United States Patent Application Publication US 2026/0324648 A1 - sequence listing, part 2

SEQ ID NO: 1 - DNA, 4277452 bp, synthetic construct (residues 2,138,727-4,277,452 of 4,277,452)
  source 1..4277452: mol_type = other DNA
aatatcggcctcggccagtccctgacggagcgcggcttgaaaatgtgccacatcgagatgaccacggagttcgatataatgcgcgacagcgtaagcgttattttggaccgcgatctgatcggcaaaccagatacccggttgagctgcgaccagcggtaattcgctttcgttcgcggccgaaaaagttagggttaaagcctctgacacggcaacaattccttatttggcaagtatcaagaatccggttattccggcgtctgtccatcggtcatgctgggctatctcattcggcgcagcctgtcagcggttacgcatctacagcgcgaaaaaaccgcctgacaaagcatttttaagggttttaggcgctgctagatgcaacatgacaagagataggtttttattccggttgagcattcatcaggcgctgagggcgcatatccgtccagttcatttccagatagcgtacgcaggcttcccttaccgccggaccaaataccggttcccaaccggcgggaatcgcagtgatttcaggccacaggctgtactggcgctgagcgttgatcagcacaaaaaagggaatgctttcatcatcaaaagggttcacttgggcttcattcatcatattaattactgtcatttttaagattgagtaaataatgcagaccatcgattaatccgccccgccagcacacggcatcatgcccgccagaataaaagcggcagtttacgcggtgaggggattgctctaatgcatgctgcatttcctgattaacctgataaatcacgtcttccctgcgccctgcctccataaagatatccagttgatgatcggctcccacgccttgctgaacttgctgagtaagccaaccggcaacttcagcgttgccgtcgggcatcagcgcggaatcatccatacacggccaccaaaatgaacctgactgactgagtacgcagccaaagcgctgcggccaatgtagcccagcatacagcgcggctaagccgccataactttgccctgcaaccacagtgcgtgaggccaggccactaaaaggctgatactgcgccaccagcggcagaagttcggcctgaatcgccaaccagaactcccgattacaaggcaactcttccccgcgatgctgctgatcgataacgtcaatcagcacataaacggtgggagggagctggccgctctcggtttgtcgatccaacacgccaaataccggctgcccctgcgcccaatattgcccatccagcaaaatagccaacggacgatcctgcggttgatcggtttccccagtggaatagatccaaatattgcgactattaccgagcaacttactgttccagaggatcttatgcagacgcgccggatcgactggcggcggattgccagcatcgacgtctttccaagcaggctgcggaagtgaagcgggaagatgtactgcagagagaggtgtgccacggttgctgtaatgtggtcgaattcgatttagcgggtcgctttctgccagatccagtaaagaaatccaccagttacgctgcgccatgcgccgctgctcatggctaccttccggcagttgcaaacactggctggcgctgaccggaatcacgctatagctaccgcgaaaatcaggctcaacctcagtctgccaataccacacatcggaatcaccgaggcgctttaggcattcaggcgtaaaactgtggtggtcagtgacaccgttaacatcaatataaactcggttgagggaagactgctgagcgtttccctgtgggtctcgccataaaaacgtcagttttacccgatctgtctctctaggttcaaccagaggagtgccccactgcgcaacctgttgccaccatgcctcactgccagcctgaggatcgcttaataagctttggctgtccggataactgttcactgcattcacaaccttccctcgctgtttcaactttctgtatcagtcctgaaaaccattaggcaggctaaagattgattcatatatatttagggatacaagcaaacacaaataatattgagaactatttgtgtttgcaataacatagttggcattcgctctaatacatcaacttatagtttgctcaccccataggcaaactggcggcgcttagcacaaaaataaagcggtaataccgtcgatgtactgattttggctggattggatggccttagagacactgcgttaaggtttggcaggaatgcgcgaacatacccagccgagcctgacaatacgtaataccgggtgaccttaagccctgattgcgcaaacacgctttttatttttattaattgtgttctaggtaagggataaatcatgttcgatctttctggcaaattgatgccaaggaaactaccgcttcgcgtcagctctacctctaagactttactatttacctctgcacttattcttattccgtctctcggcgctcaggccgagacgaataaaactgccaatgcgccgaaagaagataaattagtggtggttgcacaggcgggcagtggggaggaagattcaggttttgtagcgaccaatagctccacggggacgaaaaccgatactccactgattaaaacacctcaggccatctccgttgttacccgtgagcaaatggcggcgcaagatgcgacctcagtcgctcaggcattgcgttataccgctggcgttatctctgaatatcgcggcgcttccaacctgaatgacgaagtgactattcgcggtttcggctccgttcctcgtttcctcgatggtttgagctatagctccatcggcggcgtgcgtcgcgctggccaaatcgatccctggatgctggaacgggttgaagtcgtccgtggcccggcgtcggttttatatggtcaggttaacccaggcggcctgattaatatggtcagcaagcgccctaccgctgaaagtatccataaagtacaggctcgcgtcggaaataataaactggccgaagcggcatttgattttggtggcgcccttgatgacgaggggaaagtcctttatcgcctgaacggtatcggccgcactcaagatgatgcggtgcaatcatttaagcaggaacgttttgccattgctccggcaataactttcttaccaaatgaagataccagcttcaccttattaaccagctatcaaagagagcctgaagccggttcacgtaacttccttccggccagaggattactgaccgcgactcagtatggttatattccgcgtgattttaacgtcagcgatcccgcatttgatcaatcatggcgtgaacaaacttccgtcggttatgctttcgagcattatattaatgacacctttaaattccgtcagaatctgcgttatacccaaataaagcagcattataattatctggtatttttggatatgcagcctgacaaccgcaccatgaatcgccgtgcgcaaatcgaaagacagcaatatggcgaattctcgcttgataaccaattgcaggcagatttctggaccggtgaattaaaccacacggtattaactgggctggattacaaacgtacccgaattgatagccagttcctgatggatcgcggcagcaaatacgatttggactgggtatctccggtttatggtctgaatattcaggaaagcgcgctgggagtcagcgatgacgatctgaataaactggatcaggttggcgtttatctgcaagaccaaatcgaatatggcaactggaatctattgctgtccggtcgctatgactggtcgcaaatgaaagcattaagccgcgtcaccagcaaacagacgcagcaggatgataacgccttcaccggtcgcgcagcggtgctgtacgcctttgattccggtatttcaccttacgtcagctatagcacctccttcgagccgaatacgggtaaaggcgcaccgggtcacgaagcgctgaaacctattaccgctcgtcaggtggaagccggtatcaaatatcaaccgccgggttcgcaaaccttgctgactgcggctctatatgatttacgtcagaaaaacatcagccagcgcgatcaggtgctgaactacgacattcctatcggggaaactcaatctcaaggcttggaaaccgaattaaaaagcgcgctaagcgataatattgatgtcatcgcgtcttatacctacaccacggctaaagtgcgcgaaacaacccgcgttggcgagcaaggtaaaatgccacccactattccacaccacgctgcggcgctgtgggggatgtatacctttaacgaaggcgtgctgagtggtttatctaccggtgctggcgtacgttatatgggcaccagttggggtgatagaaagaacacattcaaagtaccggcgtctaccgtgtacgactggatgatgcgttacgaattaggtaatgcagttccgacgctgaaagggacctcactacaggttaacctgaataacatcaccgataaggagtacgtggcaacctgttcaaccgattccgcctgcttctatgctccgggtcgtactgctaccgcaaccgtcagttattcctggtaatcgctgcgtatacaccgcgcctgtctgctggcaggcgccgatttcctactgccttcctcttatcttccatacaaaccttaaagaaaggtaaatatttccccacgcgttcactctcccttcatcgccacgacaatataactttataaaatataataagttaacctaataataactttccctctcatgtcatttaacctttctaaaattagggttttatctttatactcgccccatcacccattgaggcaaaactatgtcagcgtccgtaggaataccccagttaatgcaccgcatacgcaccagtacccagcgtatgtgcgggctgctgttggtatttttctggctgatacttaatgctcaagttgcggtagctggccatcattgcgatttgatgctgtccgacaaaccggcggttattcagcatcaggaacatactcggcagacgatggatatgtcccacggtcaggcgcaaaatgcgctgtgtgacaaacactgcgtgccggattcgatgcagccagacggcagcgttatcgcgctagccgctttacttccacaaaccgaactgcggctcgcagcggttcaaacccatgaagtgatacaaaaaagcgattggtattcccctcccatcgccggacctccgacggagatcgttttctgtcgtttcagagaataactccagaccttgatatcccctgtatgccgtcattcagcggcaccttgcgtttatttattgtctggagttaatcatgaaaatccttattgctacccttttcctcgtgttacctaccgccgttttctcagccgatccgcattcccatcagcatatgtatcaaccggatgcatcgagtacatccgtagaaaccatttatcagtcccaaggtaaaattaagacctggagcgccgcaggggtattcatcagtcatcaggccattccagctcttaactggccgccgatgaccatgagctttagcttacccacagcagataatctgcaacctttaacggtcggaacagaagccgatttcagcttccgccagaccgcgcagggttacgaactggtttccatcgctccgcaccaatcttaagcagggttaacatgatcagattcctctctcatcgttctccggtgcggccagcccttgcctgctcgctcaccttgctgacgctgtgcctgccgttggcggctcaggccgtcgagatcacgctgaatcaggctatcagttcggctgaacgttattccgccgaactgtccgccaatcaacatcaggtgaatgcgttggaaaatatggccagttccgccactcaactgcccgatcccaaactcaaattcggaatagaaaatctgccggtcggcggcaataacggtcaccgctttactcgggaaggcatgaccatgcagcgtattggcatcatgcaagactatgtaagcggcgataaacgccagcgcaaagccgataccttcaacgcggaggcacgcaaaaccgcggcggccagcgaaactattcgcgctcgtttgcagaaagatgcggcccaatcgtggctggatttggcgctcgccgaacaagccgtcagagatgctcaaaaactggtgctggaaagtgaaaaacagattggcgtaaaacgggctggcgttatcggcggagccagccctgccagtagcgtagtggattcccggttgatgctggttgccatgcaggatcgcctaaccaacgccgagcgagacgtgcgtctggcgcaaacgcgtttgacccagctaaccggtttggaagtgaccaaagccagcggttcactgcccgctttcacccgcctgcctgctgatgttgcggttttgcaggcggcggtgctccagcatcccgaagtattacaggccagccgcgaagcggaagtggcaaaggctcgttcggctcagtctgccattgcggcaattcctgatattggcgtcgaggtttattacgccaaacgttctgagggctatgacgatatggccggggtgatggttagcgtggatttaccgctgtttcgctcccaaagacaggataaagactatgccgccgacgtttcccgcaccatggaagccaacgatcagctcactttactgacgcgagatcatcgggcgcagctcgacacgctattggcacaatatcaggccgcccagcaacgttggcagcgtcagagtcaggaagtgctgccgctgcaaaaaaagcggctagatctgatcattgcgcagtatcagggcaataaaagcgatctgtcctcggtgatggatgcccgtcgggcgctattggaaagcgagctaaacactcgcgatgccgctcgtgaactggccgccctgtgggttgctattcgctatttaatcccgcaggagacaacacgatgaaaaagcacttcactttgagtctggtcgccgtcgctatgctgggcggattgaccggttactggttgggaaaaccggcgcaacatagcgaaataacttcgcctgacaccgcagaatctggccgtaaagtcttatattggtacgatccgatgactcctggacaacgttttaatcagccaggtaaatctccgtttatggatatggagctagtgccccgttacgccgatcaacaggccgatgacggaggcgtgattatcagtgccagacagcagcaaaatctgggcatacgcacggaaaagtcccagatgcgtagcctgaatttgcgcttaaccgcttacggcacggtagctaccgatgagcgcagcgtttcagttataccggctcgtgccaacgggatcgtcgaacagctttgggtgcgagccaaccagcagcaggtcagcaaaaatcagccgttagcgtctctgtggataccggaatggaacgccgctcagcaggaatatctggcgatccgcaagttgggagataacccgctaacctccgccgctcgccagcgtttgcagctgcaatttatgcctgatgaaattattcgtcaggtagaaaaaagcggtcagccgcaaacccgctataccttacgcgctccctccgcaggttacgttaacaagctggatattcgcgctggggcgcaggttagcgccacgcaatctctatttgaactggccagtctggatccggtttgggtcgtcattgattacccacaggctcaggcgagccagttgcagctcggtagcgctattcaggcgacctctgccagttggccaggagaaattttccatgggaaagtcagtgaactgctgcctaacatggatttaactactcgcacactgaaagcccgtatcgtgctggataacccgcagcaaaaattaaaaccgggcatgtacctgaatctgcaagcaacctcgcgggaagcgctgccaccggtgttggcaatcccgcaggaagcgctgttactgactggcagtcgcagtcgggtgctggtcagtgaaggagacggtcactttaaacccgtcaacgtcaccgccggtcactctcaggacgggtgggtagaaattaaacagggactgagtctcggcgagcaagtggttacctccggtcagttcctgatcgactccgaagccagcttgcaaagcgtacttccgcaaatggaggagcctaaatccatcgatggtagcaatccaactagcgccgtcgcgccagatacctatagcgcttcaggccgcgtcaatgctattgacgggcaaactatcactttgagccacggagcgattcctgcgttgaaatgggggccaatgacgatggatttcactcttccagaaagcgattttcctgcgaatatccacgtcggtgctcaggtggattttcaattcacgttggacgataacggcgcgcatattcagcacattaacccatcaaaattggcagataagcagcaaattcatggaggccacctatgattgccgccgtgattcgttggtcattacgcaaccgcttattggtgctattgggtgccgtcatgatggccggctggggaatctggtcgctacagcaaacgccgctggatgccctgccggatctatctgatacccaagtgattattcgcgtcagttatccgggtaaagcgccgcaggtggtggaagatcaggtgacttacccgttgaccaccaccatgctatcggtgccgggcgcagaaaccgtacgtggtttttctatgttcggtgattcctacgtgtatgtgctgtttgccgaaggcaccgatccttactgggcgcgttctcgcgtgctggaatatctcagccaggtgcaatccagtctgcccgccgaagccaaggccgcgctggggccagatgccaccggcgttggctggatctatgaatatgcgttgatagataaaaccggtaaacacagtctggcggatttgcgagcgttacaggattggacactaaaatttgagctgaaaaccgttcccaacgtctccgaagtcgccagcgtaggcggtatggtgcgccaatatcaggtggtgctcgatcctgaacggatgcgcgcactgaatctttcccatcagcaaatcgccagcgccattcaggatagtaatcaagaaggcggcggttcggtattggaaattggctcggcggaatacatggtccgcacctccggctacctgaaaaagctggatgattttaacaacatcgtgattaccgcccgcgacggcattccaatcctgttatcggatgtcgccagcgtgcgaatgggccctgaaatacgccgcggcgtggccgaattaaacggtgaaggcgaagtggctggcggcattattgtgatgcgctacggcaaaaatgcgttggaaaccatcaacggcgtcaaagccaaactgcaacaaattcagcaaacgctgcccgcaggcgtggaaatcgtaccggtttacgatcgctctcagttaatcacccacgccatcgatagtctgtctttcaaactgctggaagagtttctggtggttgccgtgatttgctcgctatttctcttccatttccgttcggcgctggtggctattattaccctgccactgggaattctcggcgcgtttatcgtgatgcattatcaaggagttaacgccaacattatgtcactgggaggtatcgctatcgccattggcgctatggtggatgccgcgatcgtgatgatagagaacatgcacaaagtgctggaacaatggcgaaaagatcatccggggcaaaaacccgtcggaaaggattactggcacatttccgagcgggcggcgattgaagtcggcccggcgctattttgcagcttgctcattatcacgctgtcatttattccggtgttttcattacaggcgcaggaaggccgaatgttctcgccgctggcctttaccaaaacctacgccatggcggtttctgccggtttagccatcactttagtacccgtgctgatgggctattttattcgcggtaacattcccgatgagaatgccaacccaataaatcgctggctaatcgcattatatcagccggtgcttagcgcggtgctggctcgccctaaaactactctgacgctagccgctgtggctttggtcgccacgttgtacccgctcagccgtttaggcaacgaatttatgcctgcgctggatgaaggcgacctgttgtatatgccatcgactttaccgggtatttcagtgcaggaagccacgcggctgctacaacaaactgaccgtctgatcaaaactattcccgaggtcgatacggtatttggcaaggcgggacgggctgaaaccgcgaccgatcctgcgccgttaaccatgatcgaaaccaccattcgttttaagcccaaagatcaatggcgggcaggtatgacgatggacaaattgatcgaagaattggacgccacggtaaaagtaccggggatcgcgaatttgtgggtgccaccgatccgcaatcggctggatatgctttccaccggcattaaaagtcccgttgggatcaaggtaaacggtaagaatattcagcaaatcgaacaggttgccttacagatcgagcaagttgtgcggcaagtgcctggtgtcacttcagcactttctgaacgtttagctggaggccgctacgtagatatcgatatcgatcgccagagagcggcgcgctatggagtttcggtcaaagagctgcaatctctggttgccagcgtgataggcggacagaatatcggtgaaaccattgaagggcgggaacgtttcccgatcaatcttcgttatccgcgtgagctgcgcgattcgctgcaaaaactgcgcgacctgccggtattgaccgctgcgggcgggcaaattgctctgtcggaactggcggatattcgtattagcgaaggcccacctatgctgaaaagtgagaacgcccgcctctccgattggatctatgtggatctacgtggacgagaccttaaatctgcggtgttggatatgcaaaaagcggtggatcagcaggttaaactaccggaaggactctctctcagttggtcaggtcaatttgaatatctggaacgagccaccgccaagctgcaaattgttctccccgtcacgctgatgatcatttttgttttgctgtttgtgaccttcggcaaagtcagggatgccgcactgatcatggcgacactacctttcgctctgatcggcggtatttggctgctgtatggattgggctacaacttctcggttgccgctgcggtgggctttattgctctggctggcgtggccgctgaatttggcgtcattatggtgctgtatctcaatcaggcggtgaaaaagcatcaattaccggggcaaccgctgaccgcggaacaaatgtgcgccgccatccacgaaggggcggtcctgcgagtaaggccaaaagccatgaccgtcgccaccattatggccggattactgccgatcatgtggggaggcggtgccggatccgaggtgatgcagcgcattgccgctccgatgatcggcggcatgatcagcgcgccgttattatcgatgttagtcattccggcggtgtatttactgatgcatcgacgtaaagggtaatctttttcgcgcgggataaaggggtatcccgcgcgcgaaagatcgctgttttaacgggtaaagccgacgcggcaaagatggctgtctccattcagcgtgatagacttaacgccagaagaaatccataacaatctgtattcacttatctctcccagaggattcatcatgagccgtgagattaacaaagacacccgtttgtgcatgtcactggccggacggccgggtaacttcggcacccgattccataatttcctgtatcaagaactggacctcaactacatctacaaagcgtttactaccaccgatattcaggcggcggtcggcggtatcagagccctaggcattcgcggctgcgcaatttccatgccgttcaaagaagcctgtattcccttcctggatgaattagacgcttccgccactgctattgagtctgtgaatactatcgtgaatgacgatggcttcctgcgggcgtacaacaccgactatatcgctatcgccaagctattgaaccaatatcaggtgccaactgaaagcaccttcatgctgcgaggcaacggcggaatggccaaagcggtcgttgccgcgctacgcgatgccggtttcaaacacggtcatatcattgcccgtaatgagaccgccggaaaagcgctagcagaaaactacggctatcaatggcaggccgacgttggcgatttgaccgccgatatggtaatcaacgtgacgcctattggtatggccggaggcgcagaagccgagacgctagcctttgaaccggcaaccattgaacaggctaagattgtgtttgacgtggtggctctgccagcagaaacaccattgattcgctacgctcgagagcagggcaagcaggtgattaccggcgcagaagtgattgcgattcaggccgttgagcagtttgttctctacaccggagtgcgtccaaccgatgaacaggtagaacgtgccgctgctcacgcacgcggttaatatggatttctgaccagaacgtttacctgatttcagacataaaaaagcgcagtatcaaaccgcgctttttatttgcaacctgtcgctttcgcctactgggcgttagccgcttccattccgaccaatcccactttgagataaccggctttccgcagcgaatccatcacgctcatcaatgtttcgtaatccacactcttatccgcctggaagaagattgtggtttccttattggactgcgttcgcttatccagcgccacggccagcgtttcgcggtcaacctgctgctcgcccacgaacagttggttatcggctttcaccgacaggaacaccggtttctcaggacgcggttgcggcgcggcggaggacgcaggcagatccactttgatgtctacggtagccaaaggcgctgccaccataaagataatcaatagcaccagcatgacatcaatgaaaggcgttacgttgatatcgtgtaattcgccgctttcatcaggattttcattcatgtgcattgccataaatcaccccgcacgcagttgttgagcatggcttgatgatttattttctgcggtgctgctagccagatccagatcgcggctcaataacagcaaggcttgcgcggcaacatcacccacgtgagcgcggtaagttccgatcaggcgagcaaagatgttatagataactaccgcaggaatcgccgccaccagacctaatgccgttgccagcaaggcttcggcaatacctggagccaccaccgccaaattggtggtttgcgaatgagcgatgccaataaagctgttcatgatgccccaaacggtgccgaacaaaccgacgaacggagagatagccccgatagtcgccaggaagccggttcctttgcccatctgacggctcacggcagccacacgacgctccaggcggaaagaggcgcgctctttgataccgccattatcagtggattctgccgatagctgacgctcgttttccgcttcgcgcagcaacatgccactgatgctttccggcgcaaaatcttcggcctgcgccaaagcgtcgctcagattagtcgccgagccgagcacaatgtgctcatgacgcaggcgacgacgggcgcggtacaattccatacctttagagaataaaatagtccaggtaacaaccgacgccagcaccagaccaatcatcacggctttcaccactacgtctgcatgctggtacataccccaaacggacaaatccatcgccagaccttgtggagcagcaggcgccgccggagtcacagattgtagcgcaggagcaggagcggcatccggcgttgcgacagaggttaactccggctgcggcagcggagttgaaaccgcggcggtgtgctgcgttgacgcgggcgccacgccagcggcaactgcactgctattacctggggctgctaatgccgggccagataaacctgcgattaacaagagcgccataacgccgcgccctaacttcactccccgaccctggtttgcggcgaatgatttatgttccataactttgccagctgttttcacgctgcgcctccacccaatatgcatatcaatttaaggacgaaatcagtggcggatcatatcaaacaaatgacggattgatagtaattatcattattatttgagccaatttttctatctaaaagataattaaggcaaactcgccgcccagaccgctgtttttcatcgccagcctgcttcaaacgctgataacacttgggctaaacaagtaacaaccatagggttttattcacataaaactcactcgccgtcgattttctttaccaataaaccattactttctgtgcgttttgcagcatttttttgtgcgtaaaccgccttaaacagcggctccccctctttaaacgccatccggctaaaagcgcactacatcaaatgttcatcatgctaatttaaataaataaccaatcagataatggctggcaatcaatccagaccgacactaaccaagcaaggtgagcgcccgtatgtcttcaaaaaaattagaaaccacgttgatcagcgcagggcgcagtaaaaaattcaccctgggatcggttaatcctgtgattcaacgcgcatcgtcgttggtttttgacagtgtaaaagccaaaaagcacgccacaattaaccgtggtaaaggcgaactattttacggtcgccgcggcacattgactcacttcgccttgcaggaagccatgacagaactggaaggtggcgcgggctgtgtgttatacccttgcggcgcagcggcgatcagcaatgccattctggccttcgtatccgcgggcgatcatgtattgatgaccggatcggcctacgaaccagcgcagagtttttgcgataaaatcctgtcgcggatgcaggtcagtaccagctatttcgatccactgatcggcagcgccgtgggtaagttggttcagcctaataccaaagtggtgtttttagagtcgcccggctctatcactatggaaatacaggatattcccgcgatggtgcgcgccattcgcgccgtttcaccaaaagtgattatcatgatggataacacctgggcggcgggcgtgttattcaaacctcttgattttgatatcgatatttccattcagtccggcaccaaatatctgatcggccattctgacgccatgctgggcatcgccgtagccaacgcgcgctgctgggaacaactgcgggaagactcatatctcatggggcaaatggtggatgccgacagtgcctatctggctagccgcggcctgcggacgttaagtgtgcgcctgaaacagcacgaagctaacggtatagacgttgccaactggctggcgcagcgccctgaagtggctcacgtttatcatccggcgctgccagactgtcaaggccatgaattttataaacgagatttttctggctgcaacgggctgttctcttttgaactcaagcaccgcctgaaccagcaacaatttgaaaactatctggacaactttcaccacttcagtatggcattctcttggggcggctttgagtcactgattctggcttaccagccggaagatattaaagcgatacgtaaatatgaagctatcgcgcatcagggcactttagttcgtgttcatattggtttggagaatactcaagatttaattgaggatctggccgccggcttcgctcgtatcgcctcagcgcaataaggcctctaccagtgggaactgcgctaatttgtgcggttttcaccgaagttagtctctaaaccatcaacagaatgaatataccccgctaatttttggttaatgaggataagatcaatgtggcctgagtctaataccgatacactgtaaggattcacggattatcttccccaccaataggcaaacaggaaaagaaatggatgtgttacgcgaaatccttcatgccttatggcaacaggattttagtaaacttgccgaccccaatgtcatttgggttatctacggcatactttttaccactttatttttagaaaacggcctgctgcccgcttccttcctccccggagatagcctactgctgcttgccggtgccttaattgccaaaggcgttatggcttttattccgacgctgattattcttaccatcgcggccagtttgggctgctggcttagctatgttcaaggtcgatggctcggagataccaaggtcgtcaaaagctggctactacaattaccaatacattatcgccagcgggcgcaccaactgtttgtacgccacggtctggcagccctgctcattggccgttttctggctttcgttcgcaccttactgcctacactagcgggtatttctggcctgaatagtacccgtttccaactatttaactggctgagcggattgctctgggtcggtgcagtggtgggtttgggcttcgccctgagccaaatcccgttagtgaaacactacgaaaatcaggttatgaccgcactgatgattctgccggtagccttgctgctgattgggttggtcggctcactgattgtggtgtggtgtaagcgtaaaagcgccaccgaataacgcgttcagacacgctggctatccgcgattcatcgagccagcgtgcccttggttttactagtgactgcgcagttttgcccgctcgtcgctaggcgtatgaccaaagtaacgtttaaattctcggctaaactgcgacgcactctcataccccacccgaatagccgccgtactggccttcaatccatcgtgaatcatcaatattctggctcggtgtaaacgataggttttcaaatattgcagtggagaagtattggttaccgctttgaaattatggtggaaagccgaaatgctcatattcacttctgccgccaactgctccacattaagattttctgcaaattgattctcaatgcgccgtagcgccttagctatctgattaaaatgactgtgacgattcaccaactcctgcaacggagcaccacaagggccggatagcacataaaacagaatctcgcgcacgatttgcggccctaacactctggcatccagcggtttggccataacgtccaacaggcgctcggtggcacacagcatctcttccgtaagcaatgcagcgttgacgccgttggtattacctcggggtttatccagctcatcgtcaccaatatccaccagcagatcctgtagcattgggtgatcaacctgaatggataatccggcaagcggttcttgcgggctggcaaatgtttcacattcaaacggcagcgtcaccgtcagtaacagatagtttttcggatcatactgaaagattttactccccagatagcctacttttttaccttgaaagatgatcacaatactgggggtatacatcaccggcgtacgtggttgatgggcattggaaaacagcagcttaaccttgggaaccgcggacgtcgtcaacccgtttccctgtgccagttgcgcgactttttgcgccagttcccgctgaatatcgtcaatgctcaccataccaacctcatatttcataaaaaatatatcgacacgaattttgctttatttatcacatttcctacagtggtttgtagaaataggcaagaagctggcagaaatgagcattgagctatatgactaagttacccacaatagccctcagagaaatttgcccaataggttttttccgtcgcaaggacgcagcctaagggtgggaagcccactggctaatttactggccattcaaggttgatactgactattagcctattaatcaactacaggttggattataaaatcatgcaaaactttactcttcataccccgactaaagtcctgttcggtaaaggccagattgctgaattggcgaaccaaattcctgccgatgcccgcgtattgattacctacggcggcggtagcgtgaaaagcaccggcgtgatggatcaagtctatcaagcattgaaaaaccatcaattcgaagagtttggtggtatcgagcctaacccaacttatgaaaccttgatgaaagccgttgaactgattcgcgccggtgatttcgacttcctgctggcggtcggcggcggttccgttttggacggcaccaagttcatcgctgcggccgtggcttaccctgaagatccgtggcagattctagaaactgccggtagcaacatcaccgaagctattcctatgggttctgtactgaccctgccagctactggctctgaagccaataatggcgcggtagtcagccgccgtagcaccggtgacaaacgtcatttcttctcaccgcacgttcagccgctttttgccattctggacccagtggtgacctatacgttgcctaagcgtcaggtcgcgaatggcgtggtagatgctttcgtacacaccattgagcaatatctgacttacccggtaaatgccaaggtacaagaccgttttgcagaaggtttactgctaaccctgattgaagaaggcccgaaagcgcttgaaaatccgaaagattacgacgttcgcgctaatatcatgtggagtgccactatggcgctgaacggtctgatcggtgctggcgtaccgcaggattgggcgactcatatgctgggccacgagctgacagctctgcatgggttagaccacgcacagactctggcagtggtgttgccatctctgctggaagcgaaaaaagagcagaaacgcgccaaattgctgcaatacgcagaacgcgtttggaatttgcatgaagggaccgaagaacagcgtattgatggcgcgattgccgcaacccgtcatttcttcgaggcaatgggtgtaccaacccgtttgtctgaatacggtctggatggcagcactattccaagcctgatcaaaaagttggacgaacacggctaccgcagcctgggggaacacggcgatattacgctggcagatagccaacgtatctacgaagccgcaatctgatttaatcattatcgatactataaagggtaaggaaacgtccttgcccttctcctttcaaatttacgatggccatagcctcgattttttcttccagcatcgatacttactgctaggcttaaataccatatccgcggttttcatttagctgtagttcctgcccaagggatagcaacagccccctttctggtactgcaacacctttcgccctattgcatctcgtttatccatgggagagtcatatgtcgaaccaatcagttacaccctcgactgaatctgataatcacatccaggcttgggccgctcctgctgcgggccagccgttagaatccttcgtatttgatgccgggccactggctgatgatgatattgaggtcagcattgattattgcggggtttgccactcagatttatccatgatcaacaatgactggggcatcaccgcctacccctttgtccccggccatgaagtggtgggaaaaatctctcgtattggccaacatgccaaaaacaaaggattaaaaatcggtcaagtggtgggcgttggctggaatcgcggcagttgtatgcattgccatccctgtgtttccggcgatcagcatttgtgccatgaagttcagcccacgattattggccgccacggcggttttgccgatcggattcgcagtcattgggcatgggcaattccgctgccggaaggtgtggatattaccagcgcggggccgctattttgcggtggaatcaccgtcttcaatcctctgctgcaatacgatgttcgccccacacagcgagtgggcgtggtcggtatcggcgggctaggccatatggcgattcgctttatgaaagcctggggctgcgaagtgaccgcttttacctcgtctaataccaaacgtgacgaagcgctttctctcggcgctcatcgcgtggttgccagcaatgacagcaaagcgctggcaaaaattgcgaaccagctcgattttatcttagtgactgcaaatgcctccttggattgggatgcctatgtcagtacgctggcacctaaaggtcggttgcattttgtcggggcgatcccggagccggttccagtgcatatttttgcttttatcgggaaacaggctgagctatcggcatcaccgaccggcgcaccggctcgcttggcagaaatgctggcgttctgtgcacgtcacgaaattaaacctcaggttgagcattttcccctgagcaagataaacgacgccattgagcatttacacgcgggaaaagcacgttatcgcgtcgtgttggatatgcacgcttaatgcataaaatgattagcctgataattaataaataatttcgactacgataaataagagatcgattactgagtgtgcggctggctgcttcggcaaaactgcccgcaaccttgaggagaaattcatgacaaatcaaccgattattaaactgcatgatggcagcataatgccccagcttgggctaggcgtatggaaagctagccacgaggacgttcaggctgcggtcaccaaagcgctggaaattggctatcgttcagttgatacagcggcaatttacaaaaatgaagaaggcgtaggtttagcgttgaaatccgccgcgattcctcgcgaaaagctgttcatcaccaccaaactctggaatgaagatcaggctcatccacaacaggcgttagaaaccagcctggaaaaactccagttggattatgtggatctgtatttaattcactggccagatccaaaacagaatcgctttgtcgcagcttggcgggaactgattaagctcagagaacaggggctaactcgcagtattggcgtttgtaacttccatattccacacctgcaacggctgctggatgaaaccggcgtcgctccggtgattaaccagattgaactgcatcctttgctgcaacagcgtcagcttcacgcctggaatgccactcatcacattgccaccgagtcctggagcccgctggcacagggcggagaaggcgtatttgaacaaccgctgattcatcgactggcggagaaatacagcaaaactccggcgcaaattgtcattcgctggcatctggatagcgggttaatcgtcattcctaaatccgtcacgccgtctcgtatcagagaaaactttgaagtttttgatttcaaactggaaaaagacgaactcagcgagatcgccaaattggacattggcaatcgtctggggccagatcccgatagtttttaaataatggcagccaaataccgcgacaaaattacgcgatttttggtcaatcgacgaacggtaaactggcatcttgaatcggctttttaatcggctttttaatttagctttaaaagcacgcgtgaaccttcgagtcagggatgtcactcatcaatccgccagggatggcggattgatgcatcgcatgtaaaggttctggcgcaggttaacgaactttctgcttaacccggcccgcgtttgtcgactttcccccaggacgagagcctgttgaggatgatttgccctggatattggctggcgcagttttacctgaacctgatgacgttttacctgatgatccttgacccgatggcgggttgcctgatggttctttacccgatgctgatggcactttacccgatgtcattttacctgacgtcgctttgcgagacgtaacttcgcccgatattgctttgcctgagtgggcatgacccggcgtaactttaggtgaaccactcggctgacgctggcgtgcgatagcggtgtgtttagtcagcgctggcgtatggtgacgcaaagatcgtcgagcttcccgctgttcttctatcgtcggcgcaggcaccagacactcccgacgcccaccgatcaaatgtgccatgcccatatcttccaaagcggtacgaatcagcggccagttggcaggatcgtggtaacgcagcagcgccttatgcaagcgacgctggcgatctccttttggcaccaccacgtcttcacttttgtaatcgaccttagacaacgggtttttaccgctgtaatacatggtggtcgagttggccaatggcgacggatagaagttctgtacctgatccagacggaatcggtttttcttcagccatagcgccaaattaaccatatcctcatcccgagtgccggggtgagccgagataaagtaaggaatcaaatactgctctttacccgcctgtttggaataggtatcaaacagttctttaaaacgctggtagctgcccatgcccggtttcagcatttttgacagcggcccttcttccgtatgctctggcgcgatcttcagatatccccccacatgatgagaagccagctctttgatataacgcggatcttctaccgccaaatcgtaacgcactccggaagcaatcaggatcttcttcaccccttttagatcgcgcgcccgacggtacagcgaaatagtgggctgatgattggtatccatatgggtacaaatctcaggatagacacaggaagcgcggcggcaagtttgttccgcacgcggagactggcagcgcagcatatacatattggccgttgggccaccaagatcggagataataccggtaaaccctgggactttatcgcgaatttcttcgatttcgcgaattatagaatcttccgaacgactttgaataattcggccttcgtgctcggtaatcgagcagaaggaacaaccgccgtagcagccacgcataatattgatcgaaaaacggatcatgtcataagccggtatttttgcgtcaccgtaagacggatgaggaacccgttgataaggtagagcaaatacgctgtccatttcctcggtgctcaacggaatcgctggcggattaatccagatatagcgatctccgtgtttttgcatcaacgctcgtgcgcagcctgggttggtttcatggtgcagaatccgcgaggtatgtgcatataacactttgtctgctttaactttttcataagaaggcagcaaaacataggttttttcccacggtttaggcttggcagctcgcaccgtcaccggtttagcttcctcggcatctgctttcccctccggcgcgcaggctaagtcatcaccgtaaggattcggaatcggctcaatacgccccggtttatccaaacggctagaatccacgccgctccagccaggcaaaggcgttttacgaatcactacggtattacgcacatcctgaatatcagcaattttctcgccagccgccagccggtgcgccacttcaaccaatggccgttcgccgttgccgtacaccagcatgtctgctttagcatcaataatcaccgaacgccgcaccgtatctgaccagtaatcataatgagcgattcggcgcaaactggcctcgattccgcctaatatcactggcacatgcttataggcttccttacagcgctggctgtaaaccaaagtggcgcgatccggccgttttccactttcattattcggcgtataggcatcatcgtgacgcaatttacgatcggcagtataacggttgatcatcgaatccatattgcccgcagtgacgccaaagaacagatttggctcacccaaccgcataaagtcttctttattggtccagtccggttgagcaataattcccacgcgaaatccctgcgcttcaagcattctgcccacaatcgccataccaaagctcggatggtcaacgtaggcatcgccggtcaccacgataatgtcgcagctgtcccagcccagcacgtccatctcctcccgcgacatgggtaaaaaaggcgcggtgccatagcactcggcccaataaggcgtgtaggaaaatagatcgcgttctggctgaatcaggctggtactcatggcaatactctttaatcaggagatggagaggaggatgcgggtcaggaaatcatcacagggcggcgattatacgcatttatccatgtaaagaggaaggttatcggtggtttctttgatcccccaccgactcgtggagatcgcccaagaaattatcgaatagacaaacaaatagttgcgggcaatgacgtagaccaggcggcgattaaccgccctgtcttgaagaagaaaggattaaatcggagcaggctgtgtcaccaattgaccggtagagccgcgatcggccatttccagcgtctggctgtagaacaggaatgggaaatgctcggaagagacctgattgaaatacaccagcagctctacatcgccatcgacccaaaccgtatctttccaaccacggtcttccgccattgccggagcgccgttcacatttttcactaggaaagatacgccctgaatatggaaagcctgcggcatatcggcgtgcagcgtccagcgttcccaggttccctgctgcgcctgtgcgtcaacccgattcatatcccaaatcgcgccgttaatgcccggtaagttatcgcccaaacgaaattcacgagagcgtacaacgttgccgtcaagaatttggtcggccaatagtcgcattggcagattatcagttaccagcggcagtaaacccgtcggctttaaggtcaaaaccagcgtggagatcaagatactggagggttcaaacagcccgcgcagacgatccataatacccgcagactcaccggcagtaatggaaacctcgctgccctgcgacatatcaatcaacacttcgcgtcgctcacccggtgccagcgatagctgttgtacagcaacgggcgcgggcaggaaaccctgatcgctagccacaacgtggaaaggtcggccatcgctgatttgcagagtatagcggcgggagttcgaggcgttcagcaaacgcaaacgcacccatccacgagaaacttcgacaaacggactttgcaccccgttaaccagcaaagtatcaccgataaagccgcccttggccggcgggttatattccggaacgccaaagctgtccagtcgtttgtcctgaataataatcgggaaatcatcaacgccgtagtggctaggcagcggcagtgctttactcacctcatcttccaccaaccacattcccgccagcccgttatagacatggggagccatacgattaggcgtattggcgtgataccaacaggtggcagcgctttgacggatcggcagcactggagaccaatctacgcccggtgacatcatgcgcggcgctccgcccattaaagtgccgggaacctgtaaaccgctgatagtcatagaaaccggctcagacagtcggttgctgtaaatcaacttgacatcatcgccgctgtacactctgaccgttggccccagataggagccattgatgccccacacttccgcctttttacggccagacatgaatgcccagtgcgcgcgctgtaacgttaaaaacagcggttggccacggcgggattccagcaatgggggaaccggtaagggaggttgctgcgtaccgctagcctgtgccctcaatggcagtgaacctgcgcatagcgctaagcccgaagcctgaatgaactggcgacgactaagtgacatatcttctccgtgaaaagcactaacaaaccgtatgcaaaagttttgcccgccgacgccgcacgggtatcagcgggcaaaacactaacgatcaaagtcgtttaaaataaaggcatttttattttagcgtatccagtaacatactggagtcgcgttattttttttctgctgcgtacttagcaacttcagcatcaagctgctcaattttggtcgccatcagattacggcaatgctcggcgagttcgcgcactcgctctttgctgtagccgctggtatcaataggtggcagcatttctactatcaccaatccattattccaacggttcaaattaatattaccattggtattggaaacacaaatcggcacgataggtacgccagcggcgatagcagcatggaaagcgccagttttaaacggcaacagaccacgaccgcggctacgggttccttccgggaacatccagatagaaatattacgtttcttaacttgctcaaccacttgcgcaatagttccgtgggctttagcgcgattctcgcggtcaatcagcaggttaccggtcagccaatacagtggcccaaacagtggaatccacagcaggctttttttaccaacggttaccgtaccaggctgaaccacattcgacatagtaaccatatcgtaattattctggtggttagcgatatagatacagttgccatactctgcagcttccgctggaatacgttgttcaacggtgataccgaatagtcgggacattcggccaaacaaatgtccgaaggtcgcaacgtggcggggatttcgtggactgaaaagacagtaaatcgaaccaaacacacacaccaataagcaatacaaaaccgccagtactgagcgcaaaattaataacataacaacctcttgaaaacctaatcgacgctagtatagcggctgcgataaaaaacaccgcgtagattcaccgccataataaattgccattacagaaggttcaaataatctgggggaaaaggccaacggccatggctgatcgatcaaagcggtcaaccgtttaaatcgatgccgatgcggattgccagcctgaatacgactggcaatccgctcagggacaatagctactggttattttcaggctgttcagggcgcgcaggcgcgtccacttcaacccggtctatcttctgcaatccacgaggcaacggcgagcctttgcgtccacgttccgcacggaatttctgtaaatcttctggacgcagcgtcagcttgcgtttgccgaagtacagcgtcaccgaagtctgcggaggcaagacaaacagccaggctagcccgtcttcccctgccgccgcctgcgccgccggaatagagacgatcttattccctttccctttcgacaactccggcaaatcggccaccgggaacatcagcatacgtccagccatggtgatggaaagcaacatatcatccgggccatgaatttccagcggcggcaacgctttcgcgttttccggtagagtaatcatggctttacccgcgcggttcttagccaccagatcgttgaaagtacagacaaaaccgtaaccggcgttagaagccatcaacagtttttgatcgtccggagccatcaacacctgctcaatggtcgcccccggaggcggcgttagcttaccggttagcggctcaccttgcccacgagcagacggtagcgtcagcggatccagcgcatagctgcgtccggtggagtcaataaacaccaccggctgattactcttgccgcgagcagcggagcggaagctatctcccgctttgtaacttaaaccgcttggatcgatatcatggcctttggcgcttcgcacccagcccatctcagacagcacaatagttaccggctcggaaggcacaatatcgtgctcgctcatcgccttggcttcactacgttcggtcagcggcgaacggcgatcatcaccataagcggccgcgtctgcctgaatttcttttttgatcagcgtattcagcttgcgttcagaagccagcagcgcctgcaattgatcgcgctctttcgccagttcatcctgctcaccgcgaatcttcacctcttccagcttggccagatgacgaagtttcagctccagaatagcttcggcctgcgtttcggaaatcccgaaatgctgcattagcaatggcttaggctcatcttcggtacgaataatatgaatcacttcgtcgatattcaggaaggcgactaataaaccctctaaaatatgcagacgcttcaataccttatccagacgatagttcaaacgcttacgcacggtgtcgcggcggaattccagccattcggtcagaatttccagcaagcctttcaccgacggacgatgatctagaccgatcatattcatattgatacggtagctgcgttccagatcggttgtcgcgaagaggtggttcattacctgttcgagatcgacgcgattggttcgtggcacgatcaccaggcgagtcggattttcatgatccgattcatcgcgcaaatcctctaccatcggcagctttttcgctcgcatttggttggcgatttgttccagaaccttggcaccggaaacctgatgaggcaacgctgtaatcaccgcgctgccgtcttcttttttccataccgcgcgcattcgcacagagccacggccattctgataaatcttacggatttcgtctcttggtgtaatgatttccgcttcggttgggaaatcagggccttgtacgaactctagcaattcttccagcgaggtatggggcttatcaatcaacgccactaccgcctgagcaatctcccgcacgttatgcggcggaatatccgtcgccataccaacggcaatgccggtagtaccgttcagcagtatgtttggcaggcgcgcaggcagcattttcggctcctgcatggtgccgtcaaagtttggcacccaatccaccgtcccctgccccaattcacccagtagcacttcggcatatttggataaacgagattcggtataacgcatcgctgcgaacgatttaggatcgtccggtgccccccagttaccctgcccgtccaccagcggataacggtaagagaacggctgcgccatcaacaccatagcttcatagcaggcgctatcgccgtgaggatggtatttacccagcacatcacccacggtacgcgctgatttcttaaatttggcactgttgctcagacccagttcggacatggcatacacaatgcggcgttgtaccggctttaaaccatcgccgataaacggcaacgcccgatccatgatgacgtacatggaatagttcaaataggcgttttcagtaaatgtgtgcagcggtaagcgctctgcaccgtcatgagtcaaatcactcattacttaattatcctcagactcgggcgagaagatcgtggcttacagccaatcatcaccggaagttcattatagatttctgctcgcgatagtaactcatctgcggggtaactgtcacaaatccaaagcaatctacgcgggcaaatctgcctattttcgccgcaggccacgaattttgctgtctggcgcttttgtcgctaaaagcgacagttaggatgaatatccccgctttgttgcttcgcagtcaaaactgttctgcctaaaagcctatttttctatgcgaatgcaatcattagcatacgctgcaatcgagataggccagaaataatagtcacgctgtatacagcatgttgttttcactggttgtcttcacgctacccggagtatgccatgagtaacatactgattattaatgcaaagaaagaatttgcccactcaaaaggggcattgaacgatacgctgaccaaggttgcgaccgagtgtctgcaagaaatcggtcatcaggttaaggtcacggttgttgatcaaggctatgatattgaatctgaaattcagaatttcctctgggccgatacggttatctatcagatgccgggttggtggatggggccgccttggattctgaaaaagtatatcgacgaaatctttaccgaaggtcatggccgtttgtatcaaagcgatggtcgtagccgttcggaaaacagcaagaaatacggatctggcggcctgcttcaaggtaaaacttacatgctttccgtgacctggaatgcaccggcagaagcctttaccgatccaaatcagttcttccacggcgttggcgtggacggcgtttacctgcccgttcataaagcgaatcaattccttggcatggaacctctgccaacctttatgtgcaacgacgtgattaaacagccggacatcgcaggtgatattgcacgttatcgccagcatttatcaacgctgttcgcctaaaatccagcccgatttggagtggttatgattagcgttttcgcagaaattcaggttaaaccgggccgccgtcaggcggtactggattccttcgcccaactgctgccggacgtactggcagagcaaggctgcggcgggtatgtccccatggttgatgtgccaactcagttagcctggcagcgccaagcgcctgatttcatttttatgtgggaacagtgggccagcgtgcaacatctggaacaacatctcgccatgccgcatatgaagcggcatcaggaacgagtgaaagacgatgtattggacgtagttatcaatattattgatcacgccctgccagccaaagcctgatgtatttatatcgatagcttttatgtcagtcgcttgaaagtcaataacacccaatagattacatattgatagattgcatagtggagcaataagacaaacgaacgaatctttaggcacttattccactctgtgactgaagtcagtaaaagcgatcaacatcccagcagaatgaaagcgaaaaagtctaatgtgtctaccggctatccgccctcatcgggtagccggatttcccaatctacgactatttttctgctttgagccaatggctaccctgcaaacgaatctgctcgctcacgtaatccagaaagcaggtgatccgcgcagccaactgcgtattacgataataaaccgcattgatcggttgccaggcttccagcgtttgctccgccagcacctgcaccaagcgtccttccaactgatcttcccgcgtcataaaatcggataactcgacgattccttgtccattcagtgccaaatggcgcaaagtttccccactggatgccgccaagcaaggcgtaatcgatgagcgaccgccgggcaaataaggtaacgcccactgattcagaaattccggttgagtaaatcctaataagctgtgctcagccagtgcttctatcgtttctggcgcaccgtggcgctgaatatattccgggctagccagaatccgcagacggctggaacccaataagcgggcatgaatcgtcgagtcgcgcagagcgccaatacgaatggcaacatccgtccgctgctccagcagatcgatattcagatcgtcggtattcaactccagatcgatctgcggatataactcgcgaaaaccgccaatcatcggcacgatcacatgctgcataaaaggcaccgcggcgttgactcgcagtctcccggctggtttcagccgtcgcagtgcgatttgttcttcggcatcatccaccgcgccaataatctgccgagcgtgagccaaaaacagctctccttcctcggttaactccagccgacgcgtggtacgccgcagcaaggtggtttccagtttttgctccagacggctcagcgcccggctaatacccgatgtggtttgattgcgttgttccgccgccgccgtgatcgaaccgctgtccaccaccgagataaaagcttgaagttcttctaaggtgattttcattattgacatccaggcaaagatttaagctatttaaccgcaaaaacttgtagaaatgaagctgcggttagcggtcataaacgaccacgcccggatctgcatgaatgcagccgggcgcggtttaacgcaaagatccgcaaaaaaagaattacacttcgatctcggcggtatctcccttctcttgtagccaattacggcgatcttcggaacgcttcttcgccagcagcatatccatcaccgccatcgtcttatcgatatcggtatcgtcaacggtcagctgcaccaaacggcgagtattaggatcgagcgtcgtttcacgcagctgtagcgggttcatttcacccaatcctttaaagcgctgaacgttaggtttaccacgtttacgcttcaactgctccaatacgccagttttttcttcttcatcaagcgcatagaacacttctttacccaaatcgatacggtacagcggcggcatggccacatagacatggccaccgcgcaccagcgagctgaagtggcgtacaaacagcgcgcacagcaaagtggcgatatgtagaccatcagagtccgcatccgccagaatgcagatcttgccgtaacgtagttggctcagatcttcgctatcaggatcgataccgatcgcgactgaaatatcatgcacttcctgtgaagccagtacctcatccgaggacacttcccaagtattcaggatcttacctttgagcggcatgatggcctgatattcacgatctcgcgcctgtttcgccgatccgcctgcggaatcaccttctacgagaaacagttcggtcatgctgagatcctgcgaggtacagtctgccagtttgccgggtaaagccgggccgctggtcagctttttacgtaccacttttttcgccgcgcgcatccggcgctgcgcgctggaaatagccagctcggccagttgctcagccgcctgaacgttctggtttagccacaggctgaaggcatctttcaccacgccagatacataggccgcgcactgacgagaggacaggcgctctttggtctgaccggcaaactgcggatcctgcattttgacggaaagcacgtaggcgcagcgttcccagatatcgtcggcggacagcttcacgccgcgcggcaaaatattgcggtattcgcagaactcacgcatggcgtccagcaagccttggcgcaggccattgacgtgagtaccgccttgcatggtaggaatcaggttaacgtagctttctgtcagcagatcgccaccttccggtagccataacagcgcccagtcaatagcttcggtatccccagcggaagaaccgacaaacggcacttccggcaaagtaatcaggccgttgaccgcttccatcagataatcggtcaggccatcggcataacaccagcgttgttcggtgttattcaccatgtctttaaagacgatttccacgcccggacacagtaccgcttttgctttcagcaaatgtgacaaacgggaaacggagaaacgcgggctatcgaaaaacgattcatcaggccagaaatgcacgctggtgccggtgtttcgcttaccgcaagtaccaatcacctgcaaatcctgcactttatccccgttttcaaacgccatgctgtaaatctggccgtcccggcgaaccgtcacttccactcgacgagacaaggcgttaaccactgaaatccccacgccgtgcaaaccgccggagaattggtagctcttattagagaatttccccccggcgtgcagacgacagagaatcagctcaatggccggtacgccttcttccgggtgaatatccactggcatcccgcggccatcatcaatcacttccagagactgatcggcgtgcagaatcacatcaatacggcgagcgtgtccggctagcgcttcatcaacactgttatctatcacctcttggccgaggtggtttgggcgcgtagtgtcggtatacatacctggacgacgacgtactggttctagaccgctgagtacttcaatggcatcagcgttatagctggattgagtcatggtttgattaatgttcggctaagggttggagggctagcggtgacagccgggtgagtgattacactcaccgcatctggcggcgataacgtcacgctgtatcaggcagtcgttagccctaaaaaattcacaatcggtgagaaatagtgttcaaagcctacaaaggcatgatttccacctgattctaccgtttgtcgacaagaggtgtaataagcaaccgcctgtcgataatcgaggatttcgtccccggtttgttgcaatagccagagtaaatcaggcgattccaacggatctatttgcatgactttcaggtcataaacgtgacgagactctaacacatattgctgacccgtgtaggggttctgattttgccccagataatcaatcaacagctcgaaaggacgtaccgccgggttgactaccaccgccggaatgctgaaacactgggaaagccaggtggcaaaatatccacccagcgaggagccgacaatgcccagattctgcccggccttgctcataatgatatcttccagcatttccgccgcctctgccggaaacggcggcaactgcggtaccaacatgtcaatgtgcggatgattttcctgcagccagcttttgaacgcggtggctttcgccgactgcggagagctgttgaaaccatgcagataaagaagagtattcatcaatagccgtccgcatccatattggggttgaactcgtcactgtccaggcggcgtacttccgtttccagcgtaccgcccggcaataaatcgaggtaacgccatcccggcgctacggtatccagagtaaagttagtacagtgcggtttgaattgcacgcaggttgacgggctggccagcagccgcttgccataccaatcaagatccaattcctgatgaatatgtccgcacagcagcgtagtgacgcgcggatagcgaatcaatacatcggccagcatatgagcgttgcgcagactgtgttgatccaaccaggtacaacctgacggcatcggatggtgatgtagcaaaatcaaagtgtagcgttctggatgagcctgtaagcagcgttccatccactctagctgatgttcgcttaattcaccgtaaggcacaccaaaaacctggctgtccaataagagaatctgccagttatcgcctacaaacgcctgttttgatggcgcaatatttgccgcggccagcacatctaccattgccggctggaaatcatgatttcccggcaaccaaaggcatggcgcagacaaacgggcaataccctgcgcaaaatgctgataagccgctatagactgatcctgcgccagatcgccggtcgcaacgatcagatcgtaggagtacttttcggcaataattgcatccaataccgcccgatagctgcgtccggtattgacacccagcaaggtttcatcctcaccggcaaaaaggtgggtatctgttatttgtaatattctgaccctggccccactcgccataggcagttcaaacaggctttccaattggtatccttgttttaagtctgtctaacaaaccggaaccgccacagctccatgcgccaagcaatagcgcaaccagtcagcaagaaactggttaatttgatgcttttcgtcccgttgatgcaactttttattcggataatcataacttgctttgaaccgggagatctgctgactggcacacacttccgctaccctggcatcatggtaaaggcgtaccgacatcgaaggcagcccccaatggccgacgactggcgcagtctgcacaatctcaaccaccgtagtgtagcgagtcgattccaagatagttaatcgataacagatgctattgacctgataagccatgctttcattcacttcgtcagtgcgcggcgttaaacgacgcaattgtgcgtaattagtttcgcacacccgcatcatttcaggaaaatcaggcgtatagcgtttagacattatttttcccactcttttctcagcaactgatggtgcaacgccagccattgtaatgcaatgaccgaagcggcgttatcgataacgccttcttccacccagcggtaggcctgctcgcggctaaccacgtggacgcgaatatcttcattctcttcttccagaccgtgaataccggaggccgtggtggcatccacttcaccgaccataatcgataaacgctcgctggtaccaccggggctggccagataactcaataccggtttacagcgcccaacgatgatacctgcctcttcctgcgcttcgcggcgggcgacctcttccacactctcccccggctcgatcatgccagcgaccatctccagtagccaaggagactcactggaatcaatagctgcgatacgcagttgctccaccagcaccacttcgtcccggatcggatcataaggaagcaaaaccgccgcatggccgcgctcaaaaatctccctttttacctcaccactcatttcaccgttgaataggcgatgacggaagcgatacagattcaatgaaaaaaaaccgctgtaaagtgactcacgtgcaataatttccacatcattcttattcaaagttaccggtgactcttggggcaatgacatatacttttctcctacctgagtattgtgccgatatactaattttttatgacactcgttttactgatataaaaagtaaaagtcttcgcgaataaaaaatgataagcggcgggctagctatgctgtctgagtttaaaatagcaagcgtggcggccttatgggaatggttggaagaatactggtttaagtttgtgttagatttaggtaaataaaggcaagatggcacaatcagccaccttatcccattggcagactctgatagaatcggcaacaattcgtctatcgtcagataccatggcaacattttgcgcacaactgctgcacaacaaggaatgcaaatgaagaaactgctcccccttcttatcggactgagccttgccggtttcagtaccatgagccaggcagagaacctgctgcaagtttataaacaagcgcgggacagcaatcccgacttacgtaaatctgccgctgaccgtgatgctgcattcgaaaaaatcaatcaatctcgcagcccgctgttaccacagctcggtttaggcgcaggttatacctataccaacggtttccgcgataacaatggcgtagacagcaattccacctcaggatcgctgcaactgacccaaaccattttcgatatgtcaaaatggcgcgcgctgaccttacaagaaaaagctgccggtattcaggacgtttcgttccagaccagcgaacaatcgttaatcctgaccaccgctaccgcctatttcaacgtactgagagcgattgactctctgtcttacgttcaggcgcagaaagaatcggtataccgtcagttggatcaaaccactcagcgttttaacgtcggtctggatccaatcaccgacgtacaaaacgcccgcgccagctatgacactgtgctggccgatgaagtgacggcgcgtaataatctggataacgcactggaagttctgcgtcaggtcaccggcgtttactacccggaactggcctctctgaacgttgaacgtttgaaaaccgataaaccagacgcagtcaataacctgttgaaagaagcagaaaaacgcaacctggcgttgctgactgctcgcttaaatcaggatttggctcgtgagcagattaaagcggccgaaactggctatatgccaacgattgatctgaccgcttcttcatcaattactaatacccgttacagcggtagcgccagttcgcagcaaatcaataatgacgctggtcagaacaaaatcggcgtgcagcttagcctgccattatacagcggcggagcaaccaactcggcggttaaacaggcgcagttcaactttgttggcgccagcgagcagttggaaagcgcacaccgtggcgtcgtgcagaacgttcgttcctcgtttaacaacatttcggcatcaatcagcagcatcaatgcctacaaacaggttgtgatttcagcccaaagttcattggatgccattgaagccggttatcaggtgggaactcgtaccattctggatgtgttgactgcaaccaccacgttgtacaatgcaaaacagcagttagccaatgcccgttatgactatctgatcaatcagttaaacattaaatctgctctgggtactctgaatcagaacgatttgatgtcgctgaacgcagtattggataagccggttccaactgcaccagacgctgtggcgcccgagggtaaacagcaacctgcgggcagcgacgcacagaccgcgtctcaaactgtgccggtgactcagccagcggcggcgacaacccgcagttctggtaatccattccgcaactgattctgacgtcggcctttccccaaggccgacattcttcgggcgtagcattgtatacgcccgattattacttttctcatgatttcctccactttagggacaagcatttttcatcgatgaaaaaagagagctagcccgcagcatttcgtatagcaatgtaaagtatgccgctgacctccccctgcgctttaattttatacatctttcccctattcttatggccacgctatatgactataaatgggataaagggcaaaaagcccggacacaggaccaatgacgatgaaacggactaaaaacatcaatcaagagacattccgtaaatcctggcgtaactatcgcttagcgcctgtcgcgttggcggtcagtgccgtatttatgcttgccggttgcgaaaaaaccgatgaaaccgtctctctgtaccagaatgcagacgactgctcacaggcaaatccatctaaaagcgccgaatgcactgcgtcttacaataatgccttgcaggaagcggctaaaaccgcgcctaaatatgcaacgcgtgcagactgtgtggctgaatttggtgagtctcagtgtactcaggcaccggctcaggccggtatggctccgacttcagcacccgcagaagctggcgcaacggcgcagccacagcagagcggcagtatgtggatgcctctgatggccggttacatgatgggccgaatgatgggcggcggcgcaagccaaccactgtttacctctaaatcagcaggcagcccggctaacggcaaatttgttgacgcaaccggtaaaaactacggccctgctaccaccggtcgtaccatgaccgtgcctaaaaccgcgctggcaccaaaacctgcggtaaccaacactatcactcgcggtggcttcggtgaatcagtagccaaacagacctctatgcagcgcagcaatgcttcatcatccaattccagctcgcgcagtatgggtggctaaggtctgattaatgaaacgtttaccgattaccgagcgtccagactggcgcgaaaaggcgaccgagtttggctttaaatttcacaccatgtatggcgagccgtactggtgtgaggatgcctactacgaatttacgctggcgcagattgaagagctggaagataccacggcagaattgcatcaaatgtgcctgcaggtggtagaaaaggtcattaatagcgatgagctgatggcaaaattccgcattcctaaacatgtttgggatttcgtccgcacttcgtggcgcaccaaccagccttctctctattcccgccttgatttagcctacgacggtaaaagtccggccaagttactggaaaataacgcagatacgccaacgtcactgtatgaagcggcattcttccaatggctgtggctggaagatcagatcaacgctggcaatctgagcggcgatgcagatcagttcaacagcctgcaggaaaagctaatcgaacgctttactgaactgcgggaaaaccacggttttagcctgttgcatctggcctgctgtcaggacaccgaagaagatcgcggtacggtgcaatatctacaagattgtgctcttgaggccggattaccaaccgaattcctgtttatggaagaaatcggcctgggtgaaaaagggcaatttaccgatctggataaccaggttatcagtaatttgttcaagctctatccatgggaattcatgttccgcgaaatgttctccaccaagctggaagacgcgggcgttcgctggctggaaccggcgtggaaaagcattatttccaacaaagcactgctgccgctgctgtgggagatgttccctaatcacccaaatctactgccagcatactttgccgaagacgaccatccgccgctggatcactatgtgaccaagcctttgttctcacgggaaggtgccaatatccagatcgtggaaaatggcaaagaagtggcccgcgtggatggcccttacggtgaagaaggcatgatcgtacagcaattccatccgttgccacgctttggcgatagctacacgctgattggcagctggttgatcaacgatcagccctgcggtattggtctgcgcgaagatcgcgaattgatcacgcaggatctgtctcgattctacccacatattatttttggctaatccccaactatgatgtgcaaaagggaaggcaatcgctttcccttcttatatttataaaaccacttatatcaatcaaatcattagcctaaacgaaccgacagcatactcagcgatcccatttcgattccttcggtcggtagagaaatagcttcttttccgtcccaggctcccaaaatatacagcagcggcaggaagtgttccggagtcgggtttgacagcgccgcgccctcatgatccataaaatggaccagtggatggttatccccctgataatcaaggttatccctgacgtactgttcaaaagattcggcccacggataagggctagcctctcccttccagttaaccattctcaggttatgaaccacgttaccactggccacaatcagcacaccctgctcacgtagcaccgccagcttacgccctaattcatagtgataagccgctggctgggtaccatcaacactgagttgcaccaccggaatatcggcgtcagggtacattttaattaacactccccaagctccgtgatccaaaccccattcgcgggtatcggccatcacttcagcaggtttcagcagttgctgaatttgctctgcaagctcaggcgaaccgggagccggatactgagtatcaaacaaagcctgtggaaatccgccaaaatcgtgaatagtccgcggttttcccattgctgttaccgcagttccacgggtataccagtgggcggaaatagccaaaatcgctttcggcctaggaatcgccttacccaacgcacgccatgccaaggtatgactgttttcttccagcacgttcatcgggctaccgtggccgagaaacagtgcaggcatacgagaggtgttcataggaaatccttacagttaaatgaaattatcaggctctagctacaggttggtcgccagaccttgcaactacattacgcgctttcttttcattgcacagccggataaccatgaagaagatagtcaagaaatttgaatgtatagcgagggaagacaaagcgggaatccacagcggaaacagaaatgaaaaaaccgggctattttacctgttaaggaaaataaaacccggttaactcagtcagttaaatcagacagcattcagaatgctgctaaccaaactcagctggctttctgtgcatgagccaagcggtattccgccaggtcatcaatagtcactactggcatatcatgctgtttagcaaaggcaatcacttctggcgcatgcgccatgctgccatcgtcattggtcaattcgcacagtacgcctgcgggtttaaaaccggccagcgttgccaagtcaatggatgcttcggtatgaccacgacgagtcagtacgccacccggttgaccgcgcagtgggaaaacgtggcctggacggctaagatccgcaggtgccgcgttatccgcaatggccgcacgaatggtggtcaagcggtcagcggcagatacgcccgtagtaacgcctttagcggcttcaatagtcacggtgaatgcggtctggaactggctggagttgttggtcaccatcattggcaactcaagctgctgacgacgttcttcggtgatacacagacacacaatcccactgccgtgacgaattgtcagagccatttgttctacggtcatggtttctgcggcgaagacaagatcgccttcgttttcgcggttttcgtcgtctagcaccatcacacctttgccattacgcaaggcgtccaatgcacgctctacacgctcgaaaggcgtgccaaaatctgatagaagggtctgattcatggtaaaaaacctcattaaattatggattaccagaatcagggcggtcttgaggagtgttcgccaaatatacggcaaaaataacgcaagcgggcagtatgcccggcagataccgttactctctcccatccggactataaccgtcggccccggaattacaccggatctgctgacctctacgctgaatgaaattaaccactcaatgtgagcgctcgcgggcttccacaacgcgatacaaaagtacctaactatggtttaccgccggtggggactttcaccccgccctgagaataagcgtaaagactataacgctaatgattcgtccgggcaattggcaaaatgcagaattaaaccctggtcacaaaggtttatagaattgacgccaggcattacactattaggcaatcactaaacatcaaattagggaaataccatgattgacccgaaaaaaattgaacaaatcgcccgccaggtgcatgaatccatgccgaaaggtatccgcgagttcggggatgacgtcgaaaagaaaatccgccaggtgctgcaatcgcaactgactcgtttggatttggttaatcgtgaagatttcgacgtgcaaacgcaggtgttactgcgcacccgcgaaaaactggcaatgttggaacagcggatgagcgagctggaagccaaatttaacgcggcgccagttgctgcgcaggacgaagccgagaaaaccggcgagtaattatttccagcgttcagcttaaaggggctagaatgccccttttttcgttgataaaaaacatcttaatgttagccgatgagtcagcgatcaaccgttgatatggttgtttttggcaaaatgagccaaagtcccgcaaacataaccagagcgtataaactcttccacccaatcatcaacagcaatatgcagcacagcaggctgccaatcatcgccatccagcgtgaacgccctttcaacaagcgaatacccgccaacatacacagcaaataaatcagcacgaaaataccgttggcgtagacgatcagcatatccagcggcagagaaaaccaataagtcagcaacgtagcagccagacagcaacccactacggcgctaagggcattgaccggcgtttggccagcggataagcgagccaaagggctttctgggcgactgacagcctgtgaccacaccatgcgagcaaaactctgggtataaatattcacactggcgaagcacgccagatagccaataatacaagcgacccaaagtgcgcgctgaccaaaaagttgcaccactatgcccggtagagatgcggccgcggcctgctctgtgccataggcatggaaatggagtacggcaacggtacaaccccagtaaaccgcaccggccaccaacatgccgatcagcaaggcgcgaggaaaatcccgtttaggatggcggaattctgtcgccagatgcgcaaaggcttccagaccgacaaaacaccagaacattaccgctaatgcattgaatatattaggaggagaaacatcggtaatcgctggccagggaatctgagcggggctgatatccccccgccaccaaatcgccgcaaccagagcgataatcaacagggcaatcagagtttgaatattggcgctggaacctgcgctacgggtgcccagtagccaaatcaccagtaaagtagccagttgcactatcagcaagccggtagcactccagccaaagatggcctgccagaagccagcggcaatctgcaatgccgctggtaaccccacgggaatcaccgataaaaacagccagcccgccactttacccaaacgtgggccaaacgccatattgacgaaatgagccgcgccaccagcactagggaaatgacgccccagcgcggcgaaggcgatagcaatagggaacaccagggcaatcagcagtggccacgcccataggctgtcgtcgcccgccagcatggcggctaacgccggtacagcaaatacgccggtgcccagcaaggacgtagataacaaaccaacgccctgcgccaaccccaactcctgcttcaatccactcaccgtaccgccttatgccattggccatggcgcagcatccttaccctgattcagcggattgagttaaccgcgcccgtttttgatcgactgaataatattagtagtggaaacaccgtcttcaaagttaagtaccttaacttcaccgcctgcggcccagacttcagcgctaccggcgatatcttcaggcttatagtctccgcccttcaccagtaaatctggtagaacaccagcaattaagcgctgtggcgtgtcttcttcgaaagaaacgacccaatcaacagactccaacgcacccaacacaatcatgcgttgatccaacgggttaaccggacgtttctctcctttcaggcgtttagtggacgcatcactgttaaccgcgacaatcaaacgatcgcccagtttacgggcgttagccagataagagacatgacctgcgtgcaggatgtcaaaaattccgttggtcatgacgattttttcaccgcgctgacgcgcctgagccaccgcagttttaagctgttcttcggtcatcacgccaaaaccagtactggcacggccacggatggcgttttccagttcgatcggagaaaccgttgaagtacccagcttgcccaccacgacacctgcggcggcgttcgccaggaagcaagattcttccagcgttttacccgcggccaatgccgaagccaatacgccaatcacagtgtcacccgcgccggttacatcgaacacttcctgcgcctgagttggtaagtgcagcggcggctgccccagttgcaacaaggtcattccctgctcggagcgcgtcaccagcagcgctgacagctcgaaatcagcaaccagtttcataccgcgactcactaactcatcttcggttttacaatgccctactaccgcctcaaattcagacagattaggcgtcagcagggttgcaccgcgatagcgttcaaaatcactgcctttcggatcgataagcactggtaccttagccgcacgcgccaattttatcatctgctgaacgctaaccagagcgcctttggcgtagtcagaaagcaccaatgcgccaatatgaggcaatgcctgctggatacgatcaaacataggctgaggatcgacaccgtcaaatccttcttcaaaatcaaggcggatcaactgttggttacgggaaagcacccgcagcttggtaatggtaggatgcgttggcagagacacaaaatcacagcgcacgttgacttcattcagcttgctggtcaacgcccgcgccgcatcatcaatgccggttaagccaaccaactgtgacgcggcacccagggaggcgatattcatagcaacgttagctgcaccacccggacgctcttcgatagtgtccactttcaccactggcaccggtgcttccggcgatatccgactggtcggcccataccaataacggtccaacatcacgtcgccaaccaccagtacaccagcgcggcgaaaatcgggcagtgtaactttcatcccatagctccaaaacagatcattatattgtggcggataatatcacaggctttcgtttaccaataaaatcggttttgccttattacctcaggtagatgaatttcagtacaggcaaagggatttgaatagcggttttttccccttttgcgcagtgcatggcaaaaaaccggtgtcagaggcaacatgccgcaatgaaaagggctatccacttcccatccactgccaatttcaatttacaggtcagaaaaaggggcgatattcgccctacagactatttccaatagataattaataaaaatgataagaaaagtgaaatagttatcccagccaatgttgccagctagcggccacctgctctctctcggcaataaagcaatcggcggcaactttgctggatagctcctgtaaagccagatggtgaatctcatcccgcatggtgacgtaggcttgggtcaacgccaccgcttcctgctgttccataatgccgtaattggccatcagctcgaaaatacgcacgttatcagaccaacgggttaaacgcggctcaccggcggcgtagcgcaataccagatactgggcgataaactcgatatcggtaatacctcccgcatcggctttaatatcaaaggtatcccgctgtttactgcctaagtgattgcgcattttctcacgcatttcgcgcacttcctgctgcaatgtcagatcgttacgcggttgacacaaaatacgctggcgaatggccacaaattcctgctgcaggctttcatcgccatacaccatgcgtgcccgcaccagcgcctgatgttcccaggtccaagcttcgctttgctgatattctgcaaaggcttcaatggtgctcaccagcatccctgactcaccggaagggcgtaagcgtgcatccacttcatataaaatacccgatgaagtgcgggtgctaaacagatgcatcacgcgctgcgccagacgcagatagaactggcggccatcgatactgcgctcgccgtccgtcatcacatctaacggacagtccagcaggaaaaccaagtctagatcagagctatatcccagttcccatccgcccagtttgccataaccaatgacggcaaaaccgcgcccttcccgattttgtaaatgagttggctggccgtagcgtttgaccatttgattccaggcttgttgaatcaccgcgtcaataatggcttcggcaagataggttaagtgatcgctcactttcattaccggcagcgcttcagtgatatcgccggcagcaattcgtagctgctgcgcctgtttaaactgacgcaacgcttccagttgttgctcctcgtcatcctccggcacccgcagtaaatactgacgcaattcatcacgataagcgccaggagcaaggggttgatacagcgaatgaggatcgagtaattcatccaataaaagcgggtaacgcgcaagctggctggccaccatcggtgaagcggcgcacagcttaataacgtgagtcagcgctgcatggtattccagcagcagctccagataggtggtacgggtcacaatgctcaacagcagttgaatcaggcggcttagagcgatatccgcatcgcgacgcggacaaacctccgccagcaaacgcggcatcagttgatccagcttatcccgaccgcgcggcccaatggtgcgtttatccacgtcatgacggaaagaagcgagcgtgctaaggaagtgtctgcgcgcatgttcatctaaatgcggagtcaagggcgccaaatcaccttcatccaacgcatcctgccacagactgttatacgaaacatagcaggcatcttcgccaacatcaggggtatcatcgccaattagatcgtcaaataccaaacgaacggactgcatgtgattgtccagcgcatccgtcagctccgcccaattccgtttccccattccccacgccagacgcgcttgattcagcccatcactcggcaaagtttgggtttgttcatcaccaatcgcctgtaaaagattctctaaacggcgtaaaaacaggtagctggtgcagagatagtcaacctgccgctgagtgagtaatcccagctctgataccgcctgtagcgtgggcagcaacgctcgttcctgcaaacgcggctcgcggccaccgcgaatcaattggaatacctgcgtaataaattcgatttcccgaattccacctgcgcccagttttatattgtcttttaggccgcggcgtcgtacttcgcgggcgatcatgcctttcatattacgcagcgattgaatcacgctaaaatctatatagcgacggaatacgaaaggccgcagagttcgacgcagttcctggctataataatcctccgcaccgcccatcagccgcgccttcaccatcgcataacgttcccaatcgcgaccttgttcctgataatagtcttccagcgcggcgaagctcagcaccagcgggccgctatcgccaaagggacgcagccgcatatcgacccgatagacaaaaccatcaatagtttgctgatccaacgcctttatcagccgctgccctaaacgagtaaagaactgcgcgttatccagctcccggcggccaccttgggtatggccattttccggataagagaaaatcagatcgatatcagaggaaaagttcagttctccgccgcctagctttcccatccctaaaatcagcaaaggttgtggaactccctcgctattacaaggcgttccccattctttgcagcaggtttgatacagccaatcgcggctggcaataataatgctttccgccagcccgctcagctgttgcaaggtttcttccgtggtactggtctgcaacgcctgcgaccacgcaatacgcaccatcattcgccgcctgaataagcgcagtgccttcatcagcgcggcttcatcctgcacttcgctcagcacctggcccagccaatccgggtatcgtggccactcatccgcctgcggcggctgctggtgtagctcatccaaccattcgggatgaatcaacaacatatcactgacaaaatcacttagcgtcagcactgcaacgtcttcttctgttaacgtccggcttatcggaagctcatgaaaacgctgtacaatactttgcgcttgcacctgtaattctgaggagagtggcaacatttcgaatccctatacaaaacagcctgcaaaaagcaggctgttaatcagttaacgcgcagctccgttgagccagaaagcgggctgagccaacgcctctttacgggcggtatcacgccagtgtccctgacgttcaacaatagcctgttgcagaccaaaccatccatcaatgtatggatgccattcgctctgcggatagaaaccggataatagctggaaagaaagaatctgacgattcaagcgaggcaactgcgccagatagccatcgtcatccatatgatgtgtaaaggcttctttcaaatctgcagcgctgcgactcagcataatatcagcaaaacgcttaaaggaaccctgtagctttgactgccctttagcatcgaggaacggacgccagccagcgttaaccagccaagatgtgagcgccaacttacatttaagataagcggcgctgtagcacaattgttccgcctcggcatttttcgccgccagtaaaggttccagctcggtcaagagtgcccgcagctcagtgctggctttacgtggcaccaaaccaccaaataccgtcatgatctgacgaatcatcgctaacgcttcgattatcatggcttttgctgattcatcgccacgcagccacagttcttcatggtattgccagtgatccaaggccatttccagacccgcagacattccctgctcaacggtagacttaggcgcaggctgcaccaccaacaacggacgaacttcccgcgccggattgccttttgccaaatggtagccgcgcgcagctttactcaggctcccctgacgcagaccgccgttttgcgccagttctgccgccaacgccagaagatccgcctgattcccctgctttagctccagctccacttcgtgcaaagcttcgctgagatcgttggctgtaacattgcccagatccaaagccagttcaatcaggctttgctggtaagtaactacccacttttcacgcacaaagtcggtctggaatagtggtttcagttcagcctgaagtgcggtgacatcccagccttccggccagatttccacaggaaattgcgccaaatccaactctggtttatcaatagtgacattatattctgggcgctgatgcaaaccgccgaccaccttgccaccggtttttatcgtcatttcaaattgcccatcacagccgcgaatacgtaagcccatatcatgctcgcgcaggcgaccgtcttcggtttcaaagtagatattggtcagcgtttgtggcgcgaaatgttcatgtggccaggacgcaatctggcccggcaaggcagcaatggctgctggagtagcgataaattttaattctatttcaacggtcataatttcattcacaccgatatttgcgagattatgggcattatgcgccattcgcgataatttgcctgttttacaccgctttttctgtacgaaaagtctcgtgcagcaggcgagtcaaaccctattttaacctgatttgccgagtctgccctactagcttgatcagactaattttagtttctgaaaaaccggcgaaaatcgcgctaaacccgcactggcattgagagtaagatagttctcattccggtttatgcgttgcgtcggcaaactgaaccctctactatcgttccataaattcactcataaacgatgatctaatgcagaaattacgcctaatttgtctcgcagtgctaagtctaagcatcagttggggcgcgcacgctgaagaaaaacgctacatctccgatgagctaatcacctacgtccatagcggccccggtaaccaataccgcattctcggcacgctaaatgccggcgatgaagtcaccctgatcagcgttaacgaagcggcagattatggccaaattcgcgacagtaaagggcgtaccacttggatcccaatggatcaattgagtcagtcgccaagtatgcgagtgcgtttacctgatttggaacaacaggttaaaaccctgacggacaaactggctaatattgataatagctggaatcagcgtaccgctgaaatgcagcagaaagttgcggccagcgacggcgtgattaacgcgctgaaacaagaaaatgcagcgctgaaaaaccaattggttgtcgcgcagaagaaagtgaacgccgtcaacctacagttggatgacaagcagcgcaccattattctgcaatggtttatgtacggtggcggcgttgccggtatcggtctgctgctgggtctggtattgccgcaccttatcccaagccgtaagaaaaataaccgctggatgaattaatcgcggaaactgtagattgaatcctatcggctgccatcaggcggccgattttatttgctcgccccacctcgctatactctggtcaggccttaagcctcttatttcagaatcatcgatacaatcggtatcaggagaataacagtgaatatctacctggtcggcggtgccgtacgcgacaatttattaaatctgccggtcaccgagcgggattgggtagtggtcggtgccactcctgagcagttgctttctctaggttatcagcaggtcggcaaggatttcccggtattccttcatccggtcagccgtgaagaatatgctttggcacgtaccgagcgaaaatccggtcagggttacaccggctttacctgctatgccgcaccggacgtcacgctggaagaagatttactccgtcgggatctgaccatcaacgccattgcccgtagcgcggaaggcgaactttttgatccttatcatggccaaaaggatctggaaaaccgcattttgcgccatgtttctgacgcctttggcgaagatccactacgcgtactgcgagtcgcccgctttgccgctcgctttgctcatctgggcttttctatcgcgccagagactcagatattaatgcgccaaatggccgacagcggcgagctttcggcgctcacgccagagcgcgtatggaaagaaacagaaaaagccttaatcagccagagtccacaaacctattttcaggttttacgcgactgcggcgcgctggctgtgctgttcccggaaattgacgcgctgtttggcgtgcctgctccggagaaatggcatccagagattgataccggtatccatactttgatgacgctggccattgccgcacagcttagtccagacattgatattcgcttcgccgcactgtgccacgatttaggcaagggactgacgcccaaagaattctggccgcgtcaccacggccatggccccgcaggtgtcaaacgggtagagaaaatgtgccaacgcctgcgagtacccaatcctattcgggatttggcaaaactagtggcggaatatcacgatttgattcataccgtcgataaattgcgcccggaaaccctactcaagttgtttgacgccattgacgtctggcgcaaaccggaacgtttagagcaaatgattatgaccagcgaagccgatgcccgtgggcgcaccggttttgaaaataatccttatccgcagggcgattatctgcgcgcggcctatcaggttgctaatggcgtgtcgatcaaggaagtggttgccagcggcctgcaaggtctggcgattagggatgaagtcaaacgtcgccgccagcaagcgttggcagactggaaactgactctctgcgaaactaaccagaacagcgaatttcaataaacaggtgtaaaaaagccctgttaaatcagggctttttttggcatttattaacttaaaaagtttacataaatacccaatacactgccgcggccactacaaaacggtaaatagcgaaaggcacaaacgagattcgcttaatcaatgacaggaaggttttgatagcaatcagcgccaccacgaatgccgtagcaaaaccaacggcaaacatcggtaaatcgcccaaagtcaggaagtgcaggctcttatacaaatccaatccgctggcacccaacatcataggtacggccagaataaacgaaaattcagatgctgcataacggctcacgccggtcagcataccgccagaaatggtcgccccagagcgggagaagcccggccacagagctaaacactggaagcagccaatcataaatgcctgacgatacgtaatatcgtccaacccaaccgctttagggtttttaggtttcagccattccgccgccagcagcagcaggccgccgaccaccaaggcgtacatcacactttgaggctgaaacaatgactttatcgcatcgtggaataccagacccaagacgaccgccggaatcatggccaataatatgtgcccgagcgttaaatgaccgccggtctggccatcgttagccactttcttaccgccaaagtggataccgatcaggccgaacaacctgcgccagaacaccacgaccacggccagaatcgagcctaactggatgataacttcgaaagtttcagctttctcaccggtaaagcccaagagatggcccacgatgatcatatgtccggttgatgatactggtagaaactcggttaaaccttcgaccacgcccagaataaatgccacaaacagcgaatacatatccgtcatctacgctacccatacccaataagagaaaaccacaaaaaaacggcaatgttatagaaaaacactgccgtttaaattctattaaattgaaaacatcaaccgccgtaatatgaccagcttatcaatggatggtttcatttttatggcactttgtcgccagaaaaatcagcaggttcgctcaccgcgttcaattattacgccgacgttgcgagcttccgctactgcgccaggtttgctgaccttgattctcacccagggagaagcaaaacgctgcaataatatttcggcaacttcttctgccactcgctcaaccaatgcaaaacgctggccttcgacgtgtttcaagatggcatcgctgatatcagcatagcttaaacaatcgctgacatcgtcactggcggccgctttgcggttattccatcccatttcgatatcgaacactaacttctgtttaatagtctgttcccagtcataaacaccgatggtggtaatcacgctgagttcttcaataaatacgatgtccatcacgtcattctctgtttttgtgcctaccggatatcacttccagccgaatatgcgtattatccactgatgttgcgattaaaacgaccattattaaacggggcggcgttatgagtgctatcgcgcttggtatgattctcttcgcgtatttgtgtggctcaatttccagcgcgattctggtgtgtcgaatcgctaaattacccgatccgcgtgaaaacggttcagggaatcccggagcgaccaacgtattacgcatcggcggccgcacggcagcggcggcagtattagtgtttgatgtgataaaaggtatgctgccggtatggatcgcttatcttctgcatgtttcccctctttaccttggcattaccgctatcgccgcctgtctgggccatatctatccggtattctttaattttcgcggtggcaagggcgtagcgacggcttttggtgctatcgcacctatcggctgggatctcacgggtttaatgacaggaacctggctgctaacagtactgttgagcggttactcctcattaggtgcgattgtcagcgccctgatagccccgttttatgtctggtggtttaaaccacagtttaccttcccggtcgctatgctttcctgcctgattctgatgcgtcaccacgataatattcagcgtttatggcgcggtcaggaaagtaaaatttgggacaagttgaagaagaaaagacagaaaaccgctgccgaagaagcagaagaacaggagttggaagactgatttagcgctcgtccgctcccgtaactcagttctgatgacagagcgagagcgaggcaagcgctgaggattaaaaaagcggagtgagtgggctaaaatccatgaacattttgaatgactgcggcaacgcagccgcagccctgcctagactttcggaagttcagccaacggccaacgtggcctaaccgacaccgtcaactcgctattcacaccagttttcagcctaatcatgcccgcataagcgatcatcgcgccattatctgtgcaaaattcaggacgagcgtagaacacttcgccgccgcgtttttgcatcatttcggctaatttacgacgcaatgtggtgttggcgctcaccccaccggcgataactaaacgtttgaagccggtttgatccagcgcccgtctacatttgattgctaatgtatccacgaccgcatcttcaaaggcgcgagcaatatcggcgcgagtctgatcgtcattaccgttggcgcgaatggtattggcggcaaaggttttcaggccggaaaagctaaaatctagccccggacggtcagtcattggccgagggaacgtgaagcgggaagcatccccttgttgagccatacgtgacagcatcggcccgccgggataatccagacctaacagctttgcggttttatcgaaagcttcaccagccgcatcatcaacggattcaccaagcagttggtattcgccaatgccggtcacgctgattaattgcgtatgaccgccggaaaccagcaaagcgacaaacggaaactctggcgcgttttcttccagcataggcgccaacaggtggccttccatatgatgaaccggcaccgcaggcacattccaggcaaaagccaacgcgcggccaatggtggcaccaaccagcaaagcaccgaccaaacccggcccggcggtataggctacgccgtcgatatcttccggtttcagattggcttcttttaaagcagcctgaatcagcggtacggtttttcgcacgtgatcgcgcgaggccagttcaggaactacgccgccgtaatctgcgtgtaatttgacctgactgtataattggttggctaacagaccggtttcatcgtcataaactgcaattccggtttcatcgcaggatgtttctatacccaagactcgcattacatttcccatcattcacgtgcggcggacagtttaccacaaccgtgaggacagtcatggtttctgctattgactgtttatttagtttttcagaaaacatcatttccctatgcaatggcctgatttctctgcggaaggtcgccagaatgttgttgagtctcactataattgaaaaaattgttgattcgttcgacccgaaccgctgtttagtatataatcagcgcccgccgcacttctgataataaaacagtggtcggtcatacaggggcgtgcctgtttcaatttgctgtggtgctttacaacgcagcatccattgaagtaaaattccgcaccattttgagaaggctggcacttggccagcagaaaccgatttctattgaggtgagaggcacatgccggtaattaaagtacgtgaaaacgagccattcgacgtagctcttcgtcgtttcaaacgttcctgcgaaaaagcaggtgttttagctgaagttcgtcgtcgtgagttctatgaaaaaccgactaccgaacgtaaacgcgctaaagcttctgctgtaaaacgtcacgcgaagaaattggctcgcgaaaacgcacgccgcactcgtctgtattaattcttcgggggcaaccccgcagcgtgatttgttagtttctaagaacgcgcagaccgagtagttgcaacgaaggccgtgctttccgaaaggaatgcgcggcttattctcgtttatggactagcgaataggggcttatggctggacgaattccgcgggtatttatcaatgacttgctggctagaaccgacatcgtcgatcttatcgatgcccgggtaaagctgaagaagcaaggcaaaaattatcacgcgtgttgtccgttccatcatgagaaaacaccctcattcaccgttaatggcgaaaagcagttttatcactgttttggctgtggtgcccacggcaacgcggtagattttttgatgaattacgatcgactggagtttgtcgaaagtatcgaagaattagctaccatgcacgggctggaagtgccttacgaggcaggaaccggcagcacgcagatcgaacgtcatcaacgacaaagtctttatcaattgatggatcagcttagcgctttctatcagcagtcactcaatagcccatcagctaaacaggcacgtggttatctcgaacaccgcggtttgagtgaagatattatccaccatttcgccattggttttgctcccgcaggttgggacaatgccttaaaacgctttggtcgtgatgccgaaagtcgtaccgcactgaacgatgccggtatgctggtgactaatgatacagggcgaacttacgaccgtttccgtgaacgcgttatgttcccaattcgcgataagcgcgggcgagtaatcgcttttggtggtcgtattctgggggacggtgttcccaaatacctcaactcaccggaaacagaaatttttcataagggtcgccagttatacggcttgtatgaagcacaggttattcatcccaatccaacgcgtttactcgtggtggaggggtatatggatgtggtggcgttagcgcaatttggcattgattatgccgttgcctcacttggaacctcaacgacggctgaacatattcagctgctgttccgcgccaccgatcaggttatttgctgttatgacggcgaccgggctggccgagatgccgcctggcgggcattggaaaccgctctgccctatttgaacgatggccgtcagctacgttttatgtttttacctgacggagaagatcccgatacgctggtgcgtaaagaaggtaaagaggcgttcgaacaaaggatggagcaggcgcagccgctatcaaccttcttgttcgaaactctcatgccgcaggtcgatttgagcagccccgatgggcgagccaaattaagtaccttggcgctgcctttaatcagccaggtgccgggagaaacgctgcggctttatctgcgccagcagttaggtaacaaattaggcatcctggatgatagtcagctagataagctgatgcctaaacaggctgaaaacacgaatacctaccaaccgccccagctaaaacgcacaaccatgcgtatacttatagggctactggtacaaaacccgcaactggctacacttattccctcactacagggagttgagcaggcgaaactggctggattaccgctatttattgagctggtaaatacctgtttggctcagccggggctgacgacaggccaattgctggaacagtatcgtgataataaattcagtcaacagcttgaaaccttggcaacttggaaccacatgattgctgaggagatggtcgagccgacctttgtcgatacgctggcgagtctgtatgactcaattttggaacagcgtcaggaaacattgattgcccgcgatcgaacacatggattaaacgccgaagaacgtaaagagctttggtctttgaatcttgcgttagccaagaagaaatgaactacccaacggcttaattgccgataaatgcgggggcgaatccctgcaatatgccgccatagcgggcagcggcgaaaaaaaaagccccaaatgctattgttggcggtttcgccgaccgacaccaacccaaatactctgaagtgtggataccgtcttatggagcaaaacccgcagtcacagctgaagctacttgtcacccgtggtaaggagcaaggctatctgacctatgctgaggtcaatgaccatctgccggaagatatcgtcgattccgatcagatcgaagacatcatccagatgattaatgacatgggtatacaggtgctggaagaagcacctgatgccgatgatttaatgctggccgaaaacaccaatgataccgacgatgatgcggctgaagctgctgcacaggtgttgtccagtgtcgaatccgaaattggtcgtacgaccgatccggtccgcatgtatatgcgtgaaatgggtaccgttgagcttctgacccgtgaaggcgagattgatattgccaagcgtatcgaagacggtatcaatcaggtgcaatgttctgttgcagaatatcctgaagctattacttatctgttagagcaatacgatcgcgttgaagctggcgaagcccgcctgtccgacctgatcaccggctttgttgacccgaatgccgaagaagatattgcgccaaccgcaacccacgtaggttcagaattgtccgccgaagagatggacgatgatgacgacgaagatgaagacgaagacgacgacagcgaagacgataacagcatcgatccggaactggcgcgtcaaaaattcagcgacctgcgcgaacaatacgaaaacgcacggaaagaaatcaagaaaaatggccgtagccatgccagcgctgccgctgaaattctgaaactttctgaagttttcaaacagttccgcctagtgcctaagcagtttgactatctggtcaacaacatgcgcaccatgatggatcgcgttcgtactcaagaacgtatcatcatgaagctgtgcgttgagcagtgcaaaatgccgaagaaaaacttcgtcacgctgtttgccagcaacgaaaccagcgatacctggtttgctgcggctgtcgcgatgggtaaaccatggtctgaaaaactgaaagacgtagcggaagatgtccaacgtagcctgcaaaaactgcgtcagatcgaagaagaaaccggtctgaccatcgagcaagtgaaagatatcaaccgtcgtatgtctatcggcgaagcgaaagctcgtcgtgcgaagaaagaaatggtcgaggcgaacttgcgtctggttatttctatcgctaaaaaatacaccaatcgcggcctgcaattccttgatttaattcaggaaggcaacatcggcttgatgaaagcggtagataagtttgaataccgtcgtggttataagttctcgacttatgccacttggtggattcgtcaggcaattacccgttccatcgcagaccaggcgcgcaccatccgcattccggtgcatatgattgagacaattaacaaactcaaccgtatctcccgtcagatgttgcaggaaatgggtcgtgaacctaccccggaagaattagcagaacgtatgctgatgccggaagacaagatccgcaaagtgctgaagatcgcgaaagagccgatctcaatggaaacgccaattggtgatgatgaagattcacatctgggcgatttcatcgaagatactacgctggagctgccgctggattctgctacctcagagagcctgcgttccgcaactcacgacgtgttggctggcttgaccgctcgtgaagcgaaagttctgcgtatgcgttttggtatcgatatgaacactgatcatactttggaagaagttggtaagcagttcgacgtaacccgtgaacgtattcgtcagatcgaagccaaagcgctgcgtaaactgcgccacccaagccgttcagaagttctgcgtagcttccttgacgattaatcgtcagcgcacttgagtcaaaaaaccccggttaaccggggtttttctttatctattatctattctgcatcaactttcatcggctttttcgttcagccgaagataaacctgacgataggcagctactagctcgtccagcgtcgcacgattcaatccgctgggattaggcaatacccaaacctcagtattaccgatctttagctcctgacgcccccactgcattttacgtacgccaaaagcactgctaaaggcctgcttgcctaaaacagccagaatccgaggttggtatagggttattttatcaatcagttcctgcgcgccctgacgcaattctgccgcagataactccgctgccgctaccgtgggccgttctaccaatgcggtaatgccacagtcggtatccagtagttctaattcatcctcaggagccaactggcgtttagtgaacccggccaaatggataactttccaaaagcgattgctcctattggcaaagtgaaaaccgcgattggcgctgctcagccccggattaataccgcaaaataccactttcaaccgtggccgcagaatatctgtaatcataggcacccctgaatgaatgtataaaccatcactcattctatcaacaaatacaaccatctagatttgcacataaaacacgcacatagctcgctaactgtagacctatggctaaaaactaccgtataatcgccgccacatatggccccttagctcagttggttagagcacgcgactcataatcgcttggtcactggttcaagtccagtaggggccaccaaattttagctgttaaatcagtacattaagccaactttcgagttggcttttttgttggctaaaaaggcaatggcgataaaatggcgatagatattttggtgatcggttaattggggcgaaaaaaaacctgctttcgcaggcttcttttacatccacaacaccccttgattatttctacttggatgtggtggcgctggttttgtttcccccggtgacacaattattctgtcaaccgtttcgtgcgtggcgaaagtacaactgcaatttatattctgacactggtgataacgttccttcgtcttctcactcaggtaacggctagaccgagcatgtgcagcggtcttacaaagcgggcaatgcatcatgctcgtatcccctcatctctctgcttatgcaagtatgataacactagaaacgctcaaaaattagctttaagtgaataaaataatcacaaaaccacttattgtgaactcactccgcctcataagtgacatccgacaacaacacttcgagagacaattgggtggtgtagccgctgttgctcaggctgtgcgataccttgctgattatccagctctgttggtctatcaccgatttaaagccgttgaccgcgactggtgtttcaggaaataaatcagcgcgccccatggctaaagtgatagagaactcagcaactccgcgctgtaacttctcccatttagactgggcagcgcgcatggcggctttttgcgtggcgtaaaccgtcgtgataacaaagacattatcctcagcccccgccagataatccccttgtttttcctctaccggctttttctctttagccgctttggtgcgggtcggcttggctttcgggtgttccagtgcgcggagctgtttaaacttcggcttgcgctttaacttaacctttttcggcttggccggtttggggtctttggtgtgcaaccaactggcacttacaccggtatacgcgccccggtcagcaatactaaaactgtgttggtcgccatcttgtcgggtgatcgtcatttgcggaatgggtttaccactggcagtgacaccgctgcccggcttgataaacaacaatcgcccggctttaacggcggccactgcaccattaagcgaggctaaccgggtgataaacttggcgtcagtttcttgtgtctggtcgatatgagagatagcgatatccgccagcccctcggccagcatcgctttcaggttgttgcgctccgccacctgcgccacgactttacccagcgttgtctcatgataagagacttcccgccgcgcattgagcgaactccgaaaatcggcactgcgggcacgaatagtcagtgtgtctggtgcgccatggtgctcgacctcatccacggtaaagtcacctttaccaatcagcgccgaccctttccagcccaagaacaccgacaacgctgcgccgcgttccggcatggcaagctggccgtcagcgtcgtccagttcaacgtcaagctggtcagcttcaaagccccggttatcggtcaggctcagggacaacagccgagggcgaatattctgtgtgatatctttcgcgttaatcgtcagcataaagtccggggccatatccgccccggccggtagagacatgccggtcatcatgagaataatcctccgatagctgcctgtgctttaccggtcattgctgtcgctttacccagcaactcgtcagcctgttgtttcatgtcgccgaacatggccgttaatgactcgtcaacccgcaacagattgagggtgaactcaatgcgccgggcgctaccgtcttcaaataatagcgtgccggtctggctcagactctcgatgacaaacatgccgtaaatcatgccgctaccctcaaccagcggccacgccttgccttggtcagccatcgactcaagggccagcaatgacaggcgaccaccggtcagttccggcagtaatacaccggacagcttaattttctcactgtctacgccaagaaattgcgcggacgggcgcaagcccacccggctgttagtcggccaacggtactcaatatcgcgccccatgctttggtaaggcgtggtctggcgcataaaaacaaataaccccagtgataacatcatgattaatcattctccatctggccgcgctgacgggcgcgcttatcgcgttcgttcttggcaagcgcatcggtcatcattcgctccgcatcctgtctgctcatgcccggcgggatagtcatcttgatatcattggtggtgacactgctatcaatgatagtggtgccagtattggcggtgaccggctgataaccgccgtacaacacaccgccactgggtgagtacccgcccgagtaagggttatctttcggtaccttatcggccagtccgtctgacttggtatcaatgatgccgagtttttccagcacccagtcaatgccactgcgcagggtgtttagcgcattcatgggcagactgagcgccgccgccagaccctcgccgaataacttgcccgcattggtggccctgtccaaggtttcctgtgtggcttttaccggtttaatcaggtcagcgaaccagttcgaaagctgtttcaccttgtcactaaaccagttgaataccggtttaagcggctcaaaggcggcactgattggccccatagcagcgataaagccctcggccacgccagcaataaaggcgctgataggctcccagtatttacggataagcaggccaccggccacaatggccgcgaccactgccactatcggccatgtcagcgccgtgagcgcggcggcaatggttcctgccatcagtgaaaaaccggtactcaataaaccggctccggccaacagcaggttaaacccggccatcaccggccacgcaatcaatcccagcgcacccagcccggcgaccagtgctaatgccgcgccggtgactttggtaatggtgccgaccagctcagggtttttcctggcccatgcagccacattaatcagccagtcggttgcagttagggtcagtttgcgcagcgcggagtcttgcttctcaaagacttcaatctctaagtcttcccatgccgaactcaggtttttcaaatcgccgtcaaggttatccattctgaccgtggcaattgattgcgcggtgccaccggcctgcatcagcttaccttgtttctccgccagcttgccgttaccggcagcagccaccagtttcaccgcgcctttcatcgcctcttcaccgaatatcactttcaggtattcggcttgctgtgcggtgcctagcttgttctttttaaatgagttgttgatgtctttaaggattttcgccaccggcaacatattgcctttgccgtcgcgggttgtaatacccagttctttcagtgcggccggtgcttgcccgacaggcgcttgcaaccggctaaacaccgcactggtactggtgcccgccatgctgcccttgataccgttatcagccagtacaccgagtaacgcggtggtgtcttcaatgctggccccggcagcctcagcaataggggccacatatttcatggcctcacccagttctaacaggttggtgtttgagctggtaaagcctttcgccatcacgtccgacacgcgtttaatctggtctagcggcaggttaaacgccgattgcatgttggtgacaatatccgctgcctcagcaatatccacaccggacgccagcgacaggttaactgtcggctcagtggcggccagaatggcgttagcgtcatagccagaacgtgccagcgtgtcttgggttcgcgctacgtcagtcggggaaaaggcggtggatccgccgatatctcgcgcctgttgacgaatggcggccagcttggcgtcatttttatccagccctaaaatcgcctgagtgcccgacatctggctgtcaaactccatacccggcgcaaccagtttcgctgcgccgtacagcccggcagttgctacgccaagactcgccgcactggtattacgcacggcactggtggcggctttgcctttctggtaacgattgctgatacggttgagttgttcctgtttcaggctcaggcgttgcagttcttggcgctggcgactcagggcaacagtcgcctcggcggcgctactgcgtaaccggcgctgttcactgctcaggtttttggtcgctatcccgtcggcgttaagcgcatcgcgctggcgctgcactgactggcgcagcccgttgtatttggtttgcagttcagccgccgcgcgcttggctccctccatcagtcgggcttgttgagcggtgggtttctcggtgtttttaaaggcgatagccagggccgccgcatcttctttggcttttttcagcgcctgcccggtgacggccagttgggcgctggccttgcggaaaccgtcaatcttcgccgcctgcgcatcaagggatttgatgctgctttgtgtgttgcgaatatccccagtgagggatttactggcggtttgaatggctttaaacgggcgggtggcttggtctactgctttgagcaatacctgtaactgtaagttcttactcattatttacggctccactgcgtagtaaggctttatgacgccagcgcaccagctcggtgaggctcaaggcccaaagctctgacggcggccagtgaaaaatggcggcaatatccgccatcaggtcgtcaacttccagtttcgggtcgagcgttacgccccctgtttcggcgacaaaaaaccaatcaccttgcccgccagtgccactaaatccggcaattctaagcggctgcattctgcggtggtcagtgtcggtgtggtgatacggggtagcaccacaatcagcgcatccacatcagaatgagcgacatccgaaagccgcaccccgcgcagcgccccggcattggggcggtaaacttcgatttcagtaatcagggtatcgccacgctttagcggggtttccagtaccaccacattctcgttaacctcggcggtggtttcagttttaacagtgagttttttcatggtttttccaattcagtcagtaaggggccagcgggttaacactggccgtcaggggttagcggccaatggccttgcgttgcgcttccagcaggtctacgccgttaaccatttcaatcaggttaaccacgtcaatttccattaccaccttgccgtcaatggtcagcttgtagtaggtgcactgggtcgataccttggtttcggtgtcttccccttgcttggattcgccgccatcaatctctttatgacggccacggatctcaacttctaccgctgtcacttcgccggtatcgtcacgctgataagcgcccgcaaagcgcagcggaaccccgtcaactttaggcgttccccattgctgcaacaccagctcgtcgaggccgcccatcgaccactccatggatagcgcatcgtcatccagacccaaatcaatcggcgcaacgccattcatcccaccgccccggtagttctccagcttgcgagtgagtttcggcagggtgatggcggacacgatccccatgtaatcccggccatcgttaaacaggttcatcaatttcagcttacgtggcagtgccataagtcagttttccttagctgttgacggctgcggcaaagttcaccagatatttatcggtgatacgctggcgcagggttaaatcttccagtggtggcactggggtgtagtcgtaatcgataaacagcttgcccgctttcagggtgtctttatcgttggcgctgtcgtcataccagcaagcgccgtcaataatcagcccggcggatttcatttcgcggaatttggcgttgatgctgccaatcatgtctttgaccagcgtcgggtgcatcgggcggtctatcgcccacaactgcgcctcggccatggtgtcggccagaatctgcgcggtgcgggtgtagttctcaaaggcaaacagtggatcatcagaacaggtacgcgaaccccaaaacttgaagccgtctttacggatcaacgtcgttacacaggctttgttaagtaagtcagcgtcagtgccaacggtctgtaaatcccagtagacgctggcagatataccggtcacgccatttacgccgacgttagacagggttttatgccagccggtatcggtatcaatcttggcgcgcagaccgagggcgcgggcggtggcataagcaatatctgtgctgttggcggtggtgttccagctcaggaagtccggccaaatcaacatcaactcgcgttggctgaaattgtcacggtacaagatagcttcggagagggttttgcaaccgtaggcgctgatataggcaaaggcgcgcaactgctggcagatactccccagtgcggtggatacttcctgattatccagccccggcacaccaagaatacgcgggcgaacaccggtgacagactgcgcatctaacagcgctttcatgccagtgtagcggccgttctcgtctgcgccgccgatgatattagaggtggtttcggcctcatctttaccggtagccactcgcaccacaatggtgactgggcgcgactgttcagcaatcgccagcaatgacgcggccagcgtgccttttttaccggctttaccggcagcggcgcgcacatcagtaatcagtaccggggtattgagggggaatgcggttgcgtcagcatcgtcgctggtgcagaccatgccaacaatggcggtggaaatagtggaaatgacacgcgtcccctcgttgatttcgagaacgcggacgccgtgatggtaatcacccatggggtaactctccgttggttaagggtgagagtatggtgacggcttagtaagcgcgaggcattagatgggggatgtgtgggcgatggcacaacaaaagccccctgaatcggaggctgaaaagaaatgtcaggcagtgactggcggccactctggcaccacatagccattattcaccgcctcggtcagtagccagcgtgatttatccggctcgccaatcaccggtaattctatcaacggccagcctgccagcgtcggccactgtttgaaggctaagcgggtggtaattagctcactgtgctggtcttccgtcagtggtacatcgtcaatagaatagtcgctgaccatcatgggatcggtggcagcaataaaggcatcccgataatgtcgggcacgggcggctaactcatcctcggtagggacataaacgggaatacccccccaaaccggctggccttgctttccggctattctggttttaccggccggcgaagcacaggcaaaaaatgtctgataagtctcgtccgtgatttgaaccgcatcgtccggccaagtttgcgcagcttgatattccgtttttaacgactctggataagcggcattattcgtcgggctgtagaaataattcatttaaatctccttagtagccaatcactcgccacataactctttgcgctgtagggatgttttccccgtatttcttgctcagtgggatcgctgcccatgttgctgctaacatatccgatgcgagagtttttcctattatcgaaatatcggtgatgccacgtagtgtcacgctcatatttaaaactttattagggaacgctattgggaaaaaagcgtcagcataaaaaaactggtcatttgatctggaaaagggtgattctccccattgctcaatgagtccgtccggtcgtttcatccagccggttgcggcggctgaactggcaaagctcgacatatccgggatttgagtagccgctgttcctacctcacgctttgccgcaccttttaaatccaaatttttgagcgtctccgcaacagcgatagggcctagcgctttaatttcagatagtgagttttcaatctgcaagtactggtcatgagggttagcgctgcgaacgtgatcggctaatgccgttaccgctgcattagcggcggccttaaccgctctcggcgtcgccgcgtcggtttcactgttgctgtcggtggcattgctcagtgcgacaaagcctttttcgcttaacgtcgcatcgggatgatgacgggatttctcatgctcagccagtacgttatccgcgtactgcttaacttcaatcaccttatcatcgacatatttacgtgtagccagcaccactgatgggtcgattttcagcgtgacagcagccgcgctactgacaattaaaatcatccgaatggtttgggtgcgcccgctgccctcttgcagttgtggtttataggtttcggcacagttggcaatggcaaccaaatcaccgtctttatccagcaagccaatctcccggatccaccatccgccctcagtctcagggataacctgttcagcaataatctgactggtgttaatcgggtcaatggtcaacatattcagagcagcgcggcgctgctcattcatcagtttggtttgtgccgggctaggggttggcagggttccgccgccatccccgaccgccatttgggtaatttctaagcgggtgccgagcgcggtggcgttcgccagcttggccgcgccgatgttggtcagtaaagcaaagaatctcgctgtcatgggttcactctcaggtcatcgataatgtggattgcggcactggcgtaaccctcgccggtcacggttatagtttcaggtaaatacgggtatacggtcagctcatcaccgctgtaactacctgcggcgacatacagcgggccgctactgtcgagattgatagacaggccgactaagtggcggctgcatggcttggcgtcgtctatcagccgctcaagctcttgatacatttcttcggtaatgccggtttccaatacaccaacatcgaggcgaaaggtgccgggggtctcgttggtcttccaccactcaatcactttgatgagatagcccagcggctcaaccacccggcggattgcgccaatggtgcctttgtgtttgtggacgtactgcgaggacttcaccaccgcgcgcttggtggtttccggccatttatcatcccagcggtcaaccgaccacgcccacgccagataaggcagcagggataacgggcaagtgtcggcgttccagagctgccgaatgggtaccggggtattctctagctcggcgcaggcgcgcgcggcggccacttccagcaccgacgaaccaacaggcaataaacggtcagtcatccgtacccccgacagtgatgctgctgccggtgcaccaagccgcttgggttttatccagcaccacatcagccaggggagcattaattaccacccgctggacaccctcaacatgcagtgcggcatagagcgccgacagacgaatgtcgcgaccaaggcggcgctgtgcggtcacaaaggcggtcagtttcttctctgccgcaatgcgcaccggttcagcctccggccccggatgcagatagagcaccgcgtcaatctcataatcttcaatgtgggcggattgcactgtcacccggtcagccactggccgcgtattctcatcattcaacgcggcctcaaccacggccagcagttcggctgaggcttcgccgttgccctcacgcgataacaccgtgaccgtgacacaggcgggtgtcggactgattgccgaggcatcagcgacccggccgtcagcacttttggcgtgatattcatacgcaccggttggcccggcgacactcaagccctcaaaggcttgcgggatacgcacccggaaatcactgtcagattccatcaccgcctcaatgggtggaatggcggcggggtcagctgggataatcaccagccgctcaacgttgttatttgcgccgagctggtctaaatcgctaccgacggcataggccaccatcaccgcgcgggccgcatcattgacgcgctgacgtaatatcacttcgcggtaggcgttttcctgtagcaacttgaccagcggctcagattctagcgacaacgtgcgggccacggcggcgcgctgttcttccgggtaaagagatatcagcgtggctttgcgctcggccagcagggtttcatagtccagttcttccaccacaaacggcgggggtaacaggctcaggtcaatggttgccatagggttagctcacgggaatggttaaagagagaggtgccgcgctatcggtgcgggtgccggtgatatcaaccaccatttttccgtcaaaggtggtttcaaaggtgataccagtcagcttgaccctcggctcccagcgcaaaatggcactgtaactggcggccataatttgcagtctcaaggccggattttgcggctggtcaatcagctccgatagcagcgaaccataagcgcggcgcatcacccgcgaaccgacaggggtaatcagaatgtaagtatcccgcttaaacggcccattcacttttagagatcttccgacatactgatgatgtcacctgaggagatccttatgcgcaagatccgatttaccgagcaccagatcatcgccgtactgaagtccgtcgaagcgggtaggaccgtcaaagatgtgtgccgcgaggctgctatttccgaagccagctattacaattggaaggcgaaatatggcgggatggaagccgctgatatcaaaaaaatcaaagatctagaagacgagaatcgccgtctgaagcagatgtttgccgacctgagtctggaatgccgtgcgctgaaagacgtcatcgaaaaaaagctttaaaaccagcgataaagcgtgagctcgtcaactatctgaccacgcagtttacgatgagcatacgccaggcatgcaggacgttatcgctgagcaggacggtgtttcgttatcaaccgaatacacgacgtgatgaaccggtgatccagaggctgactgaggcggctgaacgctatccccgctatggatttaagaagctttttcaggtgcttcgcaggcagggatacgcctggaaccacaaacgcatacaccggatttactgtctgctaaaactgaattttcgtcgtaaagggaaacaacgcctgccggtgcgtaatccggcgccgctggccacgccggaagccctcaaccaaagctggtcgattgattttatgcacgacgcgctgacatgtggccgacgttttcggactttcaacgtcgtggatgattttaaccgcgaggctctggctatcgaaattgacctgaatattccggcgcagcgcattgtgcgggtgctggacagaatagcggcaaaccgtggctatccgctgaagatgcggatggataacgggccggaattgatatcactggcgctggcacaatgggctgaagaccatggcgtgatgctggaatttatcaagcccggcaaaccaacacagaacgcgtttatcgaacggtttaaccgaacgtaccggaccgaaatactggatttttatctgttcagaacactgaatgaagcacgggaaataacggagcgctggctgaatgaatacaacagtgagcggcctcatgaatccctgaataatctgacgccggaagaatatcggctgatggctgagaaaccggaaatctcaaaaagtgtgtggaactaaagctgggatacttacaagaatatctgctattgactggctgatatggtcagcgtcggtaatggtctgcccggcggtgcggttcatgccgagataggtggcagtggtcatttaattccctccgtataatccccaccacgcaagacgccgccgtggtcatggtcatcaaccaccacaccattggatgagaacttgccgccggaatgttcaatattgccgctcatctggccgcctttcttcacgttcaacgtgccggtggtcaggttgttggtacattccacttcgggtgtatccagcaggattttgaccaaggcagcacaggtgatagtgggggcagtggcatttatcgattcactggcattgataaccgccgttttgatgccatcagcctgcaactcgccgctctcaggttcatagtgcaacgtggcaccgtcaggaaaggcgatatacaggccatccgccgaggccgacggcggcgggaagtcatcagagaaaatgcccggcagcacaaaggcggtatccagctcgccgccgagggacaatatcaacacctgctccccctcagacggtgcccaccatgatcgcgattgaccggcgcgcagtgtcagccagttaagccagccggtggtattgtcccccgtcgccacacggcacagggcttggtcgagatcgacctcggccaccgtaccaatacggatcaggttgcgcagcaggcgcagaatttcagtaagttgggtttgtgtgttcatagatgaagcatgtcttttttataaacacgcttcaattagatgttgttctgctgtctatggcacaaaaatatatatctattaaataaatttaattattttttatcgttaattcaacttcatgatatttttccgaaaataatgaactagaaccagagttaagtgtttcacaagtaagaacacctgccttaagaagcaataatggcattgtccctatgtaataataaaaatcagcagcctttttattattataaagcaacactgtcatatctttattatcttcatcaaactctaaatgcctattaaggacggcttctaaactgctatgtgcttcagtgcatagttttgaatatattgagtcgtactcatctttcaatcctgccattgtgaacttttcagctatggttgttttgccatcaactctttgaactattttctttagacttcttatttcgttcttattttttttataaattaaacaaaagctatccatttccaataatgacttagtgtatttattgccttttttggaactccgcatcaatctctcttctctttcgtgaaattccaatataagcaatttaaagtattcttcattgttatgaatatttataacatcaacataacactctagaaaagttctaaaaatagagtatgggccggtgaaattattagtttccaaaagtgtgatcatcgaccttgttaactcaatcatagatgagaatatgcctatggctaatactgacttgatagacttcttattaaacgatatttctctaatgttattttgagaaaatgtaagagactcttttagagtgtccattggattacctttttcacccatattttaaattatattagcagaaataacatattgttagactattatttaccgatgtaacttagtacagccatttccacaatgtctatatcttgctgactgaaaccgagcaacggccgctcgtcatactgcacatctttgctgtgcacgttcggacggtcacgcaggccaaaatggtgcactgccgccatccgttccacgcgcccggcaaactcaaccaccgcctcatcagggctactgttggctttcatatagcgggcggtgcgcaacttggcgaacatttcccgtttaatgcggccttttggcttacgcaatggttgagatttacgcgccgcatacagggagccatcaggcgcttgctggcgtttaatgcgttgctgctggctggcccgcaggcgtttggcaactgtcaccgccagcgctttgcgggctttgggtgtcagactggcaatcagcccggccagtgcatcatcaaagggtttcagcgtattcatttaatccgctcaccgtggaaataaatttcagttggacgaggaagtacgcccgacaatgctggctcaggggcatggttaacatgcaatgcgccgtccagttctttcacaatcacccgctcagtcagttgcaagtcgatacggatatcacttaacacatcgctcatcacatcaaccttatgaataaagccggtgcggcgtttttcttctgttgccatgatgtccggttgatgttcccgcaaccatgccagtatcggcacaaagagataatcaacatcatcggggaaatcctcaataaacagcgtcagcgtatattgattttcaaaagacagcgacggggccagtgttgagacaatgcgcccgccatcaacaaacattttcagccgctccgggttagtctggaacagttgcagactgtcggttaaggcttggcgtaacagtttgggttttaacatggtgttgttcctgacactgtttaacagcttccacttgcagcccgcaggccaccagtgcggtttctaattggcgaatgtcggcacttaaatcaccgttaaccgccggtgtgctgcccggcagcgggcaactgctcaccgtcggacagccaacgtaaataatcgttggggttggcgaacgcggggcgctggtgcagccggataacgccagcaggcaaagcagtagcgaaccaatcacgcaagactttattttcattgagtaacctttgaattctctgttcacgagataatgacaaggtgctggcgtggctcagtgattgccgtaatgcccgctcattgtctgcctgttgccgggcctcatcttgcaggcgggtgatcgcgttgtcccggctctcaattccggtggataaagtgccaatcaccagtttggcgctgtctaactcttttttaaggttatgggcgtgccacgccagcacccccatcatcaaaacccataacagaagtaatgtgcgcatatcataccccgctcaggcagtgtgtttgctcggtggtacgtcgacgctctaaccctttggttttcacgccgttgacgtagacccagcgcggcaactgattgcaggcgctgcgccagtcgcccttgttgacaaaaaaggccagcgtcgagcgacaggccgcccccgtacccacgttaaaggcgaacgacaccacggcgtcatacaccggttgcggcatggcaaccggcatacacactgccacagcccgttcgacccgctgcacgtcagcaaccagattgaccgccacctgtcgctcactgataacgctgcccggcttaaccccggccgtgtgaccgatgccatttgtccagacgttggcgctgcactgataggcgttgagctggcagccctcataatcggcgatcagttttagcccggcgggcgatgtgttgagcgtctggtaatttggcaaggtggcggccagcgccagaatcgccccgaccagacagcgcttaacgattgagttcatcgaacacctcccgcctgatagccaactcttttagcaagaaatagctcttacgccggtagtaccagttgataaaacaggtcgccgcagcggccaccgccgccacataaaacgcgatatcttgcggactcagtgcgccaataaacgccagtaccagcgccaatacataggctaccgcagagctaaatttctccattttcaatcccataattgaacggtttcacgttgggccgccggggccatgtcgggcaacgccaccggataaccatgcggcagaatggcccccagttccgacagccccggattcgcgtcatagacttgctccagcacatcttgtgtgcgcccgtaatagcgccagcacaatgcgtcgagcgtgtcgccttgcaacgcgttgacctgcatcagataaggccaataatgttgtgaggcttaccggcaatgttgcgaatactaatccgcgcatcacgccacaactcatcaaccgtactttcaatggcttccgcacgtttatcaccgcgcgcgctggcgtcatagccgcgataacgctcggccaacagtgcagccgtaatggcacagaccgcccgctggtactcggccaactggatgctttcgccgtccagttgctcggcctgcacctcggccagtgttttaaagcctgccgtcatctggtcacggcggtactcaaacagttcagcgttaacctcggcaatagcgcctttgatggtgaagcgcagtcgctcggcggtgacggttccctcaaggcgcaacagctcgcgcagttttatcgggtcaaccgcaggccagaaaaaggtattttcaatcaccggttcggccgttttgtcaggccgtggcgcggggataacaacagtggtcatggcaacctcaatatcagaatgggtgggcggtggacgacggcgttaacaaggtaaaccctgttgcggccatcgtgccgcccggctcggggagcgttcggtttagcggctggcggcgttctttaacttcacggccagtcgctcaatgtctttcttgacgccacaaccggtatgcagttggagtgcgcggtgaaggtggctcagggccagttcgccccggtcactgtcacgcagtacataaccggtcattttgtgcagttttgcccgcacctggtcgggcatgtcttcgtcttccatcagctcaatggtttgcagcagatggtcaacatcaaccggcttaccggtggcataggctcgcccggcagactcggccacttcctcggcaatcaggtaagcggtagaacgagtaaaacggtctgttggcactaactgataacgcagagcataacgggcgatatccagtgcgccggggatatccccggcatccagacgccaaatcatgatggtcattaaaatggcgtcctgcgcgcctttcccctcactcaatacacccgacacccacggcagatagtccggcaataactgccgcttcagctcggctttacgctcgtttgaacgcacctgtttcagcttgcgtttatcttcattgagcttgagcaacatcagctcgtagccggtggcatgacgtaacgggttatcccgtagctgtgaggcggcaatagccgactgttggataaagtggcggcgcgcaggactggtcatggcttatttaccctcgtcggtaacggtaggtgcggaggctgttttcaccgcttcaaccagtgcatcagcaagacgatcaaagttggatttgtccgctgcttcggtgtcttcttttttcggcggcgataaaatctcgatattttccaccagacagccgcaggcgtaatcctccaccacataatcctgtttaatggattcatagttttcgatgcggtcacgcttggcgttctcatcgatatggcggcggtgcgagtcttccagccagtaaatagacaggttatcgaggcgggtgatcatgaatgcgttagccgggaagaatggcacacggatagccggtaaattgccgatccgcttctggctgataatcaggtcagcggcgagggtttcgctgttttcctgctctttattgacgatggggaaatacttatcctgcatcaactgacggccagtgataaccaccagttcagggtcttcctgatgccattccgcaatcatgttattcgtggcgtccatcaccagcgcgtccagattgacgtaatcaccgccatggccgacacgaattttttccgacactaccgcgccatcgtcaccgatgattttactcattacgcgggttggggcattggtgcggtatttttgcaaccagcccggcgcaatatcctgcaacatcgggttgagtgcacggtttgaggtcttggcacggtgggtgccattgaagcccgccatgatacggtcaagtgcctgacgcttgataatcgcgtcgcgcaagcgggtctggaagtcctgataacgcgcccacaggtcgagggtgttatagcgaatgtggaaatcgtagttcacctgctcacagaaatacttctcactgtccagccctgcaaactcagcggtttcgcgctcatcgccaccgtcagtatcagtattgctggcaattgacccggtaacactcaggcccactttttcagcggtcagctcggcgacgggcacaatattgatgcggctcagaaactctgaggactcttgaacgcgggtcatgatggtttgcgtgacggagggttcaacgttgaattttttattcaaatcgccggttgcgaccccgttcagttcggcttgacgggtcagataggcattaaatttaaaacgggttgctgggcgcataataatcctgattcagttaaataatgtaatggtgaaataacaacgtgaccgcacaatgggcggcctgtggccctgattagcagtcagtcagcacgtcggcttgaccactgacaccagtggattccgggcgcttggtctggttaaagttttcagtgatagacagtttgttttcgagggacgtaaccccttgttttcccttttcgatgctctttttcagctccaccacgttgtcagtcagttgtttctcaatggcggcaaagcgggcttcaatggtttccccctgttcctgcacatgcactgccacggcattcaccgcctcatgcacatcattaaaacgggcatcatcggttgcctgtttacgactgaatactgacttcaccatgctgagtaaggtgacacccggctcggccacgtcttcaaactccaattgcacttcaactgccgcagagaaaaagttatctgggtgagacttacgggcggccagtgggttgtgtttggctttggcgctgaattccagcatttcagtaccgaggctggcggggtcatcggtcacggccagcccgaccagataggctttaccggtattagcaaagttcgggcgaatttccatggaggtatagattttctgtagggctttgttcatctgcaccaaatcatcggttgggctgatttgggcgaacaacgcacgcttaccgttcaggatggaatcgtcttcaatggtttctgctttaagtgctgatacatcgccataacggcggaaggggctgtcagggaaataacttttcaaatgctccaaattgatacggcaaccgtagacgcgtggatcaaatgactcggccatctggttgatatcgtcagcgtcaatcactcgtccgtcgcaggtatcaccttcaacgccgatacgaaaatacttagagactttcttagccatgagcggctccatttaatgtgggttgtttggtacggggcttagtttccagactgagggaggcggcaacaacgaaagcccgttgtgacggggctggcacaacagcgaggacgcgcagagggtcgggctggtcgcgtagcctaatggcatgaatacgataccgagcaccatcatcagcgacccacggcgacaggcggccttgctttactggcagggcttttctgtgcgccagattgcggacacgctggccctgaaatcgccgactgtgcagagctggaagaagcgcgacgggtgggacgccattgcgcccatttcccgcgtggaaaccagcatggaagcgcggttgattcagctcatcatgaaagacgccaaagaggggcgggactttaaagagattgacctgttaggccgccagattgaacggctggcgcgggttaaccgctacagccagaccggcagcgaagctgatttaaatccgaacgtagcgaaccgcaacaaaggggagcgcaaaaccccggataaaaacctgttcggtgaatccgctattgaaaagctggagtcaatttttcacgaaaatatctttgattatcagcgcaactggtttgaggccggactcactcaccgcatccgcaatattctgaaatcgcgccagattggggcaaccttcttctttgcccgcgaagcgctgctggatgccatcacgacaggacgtaaccagatattcctatccgccagtaaggcacaggcgcatgtgttcaaaagctacattatcgactttgcccgcatggttgacgttgacctgaaaggcgacccgatggtgctgccgaacggggcgcgcctgttcttcctcggcactaacgtgcgcaccgcgcagagctacaccggcaatctctatcttgatgagtatttttggatccccaaatttcaggaactgcgcaaagtcgccagcggcatgtcattgcacaaaaaatggcgtaccacctatttctccacaccgtcgagtctggcccacagcgcctatccgttctggtctggtgagttgttcaataaaggccgccgcaataaatccgaccatatccaactggatttaagccacagccatttggcccgtggtgcgttgtgtgctgatggtcagtggcggcagattgtcacggttgaagatgctctggcgggcggttgtaacctgtttgaccttaaccagctctcactggaatacggcccgtcagaatatcaaaacctgctgatgtgcgagtttgtggacgatcaagcgtcggtgttcccgttcgccgagttgcaggcttgcatggtggacagtctggaagagtgggaagactacaacccgtattcgttgcggccgtttgggcatcgcccggtgtggattggttacgacccgtcagaggccaacggcggtgacagtgccgggtgtgcggtgattgcgccgccaatggtgccgggcggcaagttccgcgtgttggaacgccaccagtggaaagggatggattttgaggcgcaggccaagcatatcgaagagttgacgcataagtattgtgtggagtacatcggtattgatgcgactaccgtcggtcaaggcgttttccagttggtgcgccagttcttcccggccgcaagggaaatcaaatatacccctgaaatcaaaaccgccatggtgctgaaagccaagcacaccattaataacggccgtctggaatatgacaccggccacaccgatatcacccagtcatttatggccattcgcaaaaccatgaccgccagcggcaaaagttcgacttatgttgccagccgcagcgaagaagccagccacgccgatgtggcgtgggcgattatgcacgccctgttaaatgaaccccttaccgcgacatatggcggtcacagccctaacttcttggagttttacggatgagtaagcgcaaaggccgcaaggcattaagccgacctgtcaccaatcacaccgccagccaacagcagccggtggaggcgttcacctttggcgaaccctccgccgtgctcgacaagcgggaaatactggattacatcgaatgcaccagtaacggtaaatggtatgacccacctatcagctttgacgggttggcgcgcagcttccgggcggcggtgcatcacagctcaccgctgtatgtgaaacgcaacatactggcaagcacatttacccctcatgcaatgctcagtcagcaggcatttagccgctatgcactggattatctggtgtttggcaatgcgtttttagaggtgcgccgtaaccaactgggcgcaccactgcgcctcgaccccagtccggccaagtacacccgccgtggattagaaaaagattgctattggtttgtccagaactggaaagatgaacacctgttcgccgccgggagcgtttttcacctgatagaaccggatatcaatcaggagctttacggtttgccggaatacctcagtggcttaaattcggcttggctcaatgaagccgccacgctgtttcgccgcaagtattaccagaacggcgctcacgcgggatacatcctgtatatgactgatgcggcgcaaagtagcagcgatattgaggcaatgcgtaaagcgatgcgcgacaccaaagggctaggcaatttccgcaacctgtttatgtacgcgcctaatggcaaaaaagacggtatccagattttaccgttgagcgaagtcgccaccaaagatgacttttttaatatcaagaacgccactcgcgacgacctgctcagtgtgcaccgggtgccaccgcagatgatggggattattcccaacaataccggcggtttcggtgacgtggcgaaagcctcacaagtgtttgtccgtaacgagttaacgccgttgcaagaacgattgaaagaggtgaatgactggataggggaagaggtgatccggttcaagccttatgaactgataagcgaggattaatatgggacgtaaagcgccaacaccaccgccatataaccccggcgatattgtgaagaggcccgcgccaccgcctcagccaccccaaaaatgcgaaacgaaacgagtaataattatggaaactcaaactaaccagaaaatcacagtgcaacgggctgttgatattcttaatcaagcgttgtcacttgacccggattgtattactgcgctggtatcgcatcgaatagagtgtaacgcgacgttagcccatgactctgaggtgatgtgtggtatgtctgaaggcaaatacatgactggcgcgcttggcgttatcaactcactggttacagacggctttatcgctgcactgtatacagatgaaaaaaagctggcagcgtttcaagtttgcaaatagttaattgatatttttgaatatcatagccgccgaaccgggcggctttttcatgcccgaaaagtagcaatcccaacacctcgcgccatacaccaccagacgcccgtcacgccctcgtaacccatgaacacgcattgattcccaacccaaccgaacgcagcaccacggcccgcccaagacctataaataagggtatcaaaaccctttgcgcgcaatgctatccccgccacgcctgcgcgctttacaggtcgcttttcatgcacttgcatgaggcattgagaacagcactgggactggcagagacaggaaaaaggaggaagaggatcataatgcaaaataatgcagagtcatgcacaaatcttcttgaacagtgggccactcaaagtggcccaatcaatactaggattgcaagcgaatttgttgctgtatctggattggttgtaaagtttggtagcgttggcgaatgttgttataaagctcaggtgtatcatgagcttttaaagttacaatcaacacataaggtaaattaggtaaatcttcaaccgctgttggcattcccccttctcgcccataatagataacatcaaaacaagggtcattaatgatatctttcttaaaggttttttcactatgcaaagtagtttcccatttatgggcatctcctctttgctcttgttcatcggcatagatactttttaaattgaacagagggaaagtccctccctgattattttgattttttctaaaggtaacaactagcccactacgggtataattaattggatgctcagcatcaaccggcgtagtaaaacaaaatgtagcttttaaagttacatctccactgactggaatatcaggaaaaggaattgatgctctaaggtgctgtgacggttttaattcgccttgataaataaccttaacctcatcatcaccacagtaaataatatctctgatatcatgggggaatttaccccaacctacttcacttctattataaccattatttcgtgagtgatgaataagtaatgctttcgcagttaaaggagtaatatcatattgtaaacttgcagatagaccaatcgcctgacgtagaacgaggggcgaagcaaaacttgttcctgctgttttcactaaaccgttagtgaaagggctatatagcgtaaaaggctcttccgctgaacctccaaaagcaacaccatctggcttcacataaccgggactacgaccgggaccaatacaactatagctacttctctcccaattatccgaaagtgaagttgcagcaccgacagctaaagcatttacaagatctgatggaggttgaattctatttaatccacctgttttctctccatcatttccaactgcaacagtacaaagagtttttcctgtggcaaaatactgctctaatgtggaagtccatacatgaacatcatcatcgtcgacaggtagcctagggccaaggctgagatttatatattggtagtcattggagtctaatactttttttattctcaataagacatcgaaaagatcactatcttgtccattgatagaattatctaatactctataatgatcgatttttgaatatggtataggcaattggttttggccatcagctacagccccaaaaagaatagtagaagtaacatcttgtccatggcttaatagacttccactggttttttgttccgctgtaaacgtatgctctgaaacccacctgtcaaaatctgaacatcctataccaccatcgaaaatagcaactttaatatcattattaattgcattatcatcaggaagttctaattgactattcagaacagttgttctagtaaatacgggattgttaattctaagtcccggtaaatctctaattgttcttaaaaatgaaaactctgcaacctctctagcaattttagagttagctaagattggtagaaaagtaagccccttaattgaaataactttatcttctttaaccgtagcaccacaaagtgatgcatatcggataaatgaattgagaatatcatcctcttcagccggggtatgcaacgctacttcaatagccctttcctgagcagattggtcgatgtttttaatcttgtcattagcatcaaatatttttatctcctctaaagatattacttcatctttctgccctttatttaaagtccctctatcaagagaattataaaaatcagaaaatgacttcgtcgtaccggcaacatatatacaagcagtgttatattcttctttgttcttatttttaacttgttttcgtggtgatatagtcactgatttactaccaatacttctcagtgaaaactgcttaagtatttttacaggaaaatatgactttgcaagaaaagcgggatgcaaagttattttcgcaacagcttcaccatttggttttgtagcttcgggcatgttgtttacgaaatctactagagacctcaaattctgcattataaatggcctattctcctcatatgtataaggtttatttttagggccgttaccgcttttaatatgcacatcaccagttagtgtctcaccataccccaagagcaagtttttgttattcatttcttaatccttaattctgaataatctttctaatgattggccgtgaaattgatagttcagcggatatttgtcgctgagacattccctttttatgcataagtaaaataaactcatctagagactcgccgtcaaacaactcctcaaatattgctttattcacagggatattttctaagattgcattacgttttgcttgttttagggagcgttctatcactgcgaaagagcgcccttttaactcaccactaattttttcagctatagcagttggtatatcattttttactaaaaactcgtgaattaactcttctgttggatattcaaagtttataactctatcaaatctacgccagacagccgggtctaataattcaccatgattcgttgctgcaactaaaatagatgtatgaggccactcatcaatagcttggagtaaaacagtaactaatctttttaattcaccgacatcagaggaatcatcacgtttttttgcaatagaatcaaattcatcaagcaataaaacacatgggaatgaacgagcatattctaaaacagctctgatattattccctgttttccctagaaaactactcatcacacttgctaagtctaatgttagtaatggcaaaccaagtttgtttgcaagccatttagcggctaaagtcttcccaacgcccggaggtccacccatcaaaagagaacgggatggcaaaagcccattatcaattaattgatcttttttctcccactcagtgataaagcgcaacaaactagtcgtaatattcgcaggccatagaggcttaacagttagttgtactgggtaagtttcaaccaatagcttttgtcttgtatcagcatctacaggagttggtaacttacttaagctcccaccacgcaccaaattcatcggcatgctatttttaataagaatatcatttagctctgatgccaactcaggtgagtctttttttagctttcgaatcatgagccgtaagcgcatctcaagatcgtcgcgtttaccctgcaatgcatccgtcatcacttcaacaaacgcatccttagtgatgtttatcatgtaccactccgaaagaaaaacgtaccaaacattatgaatgatataccaacaagtaccatatttacattaattttaaccaatcataagaaaaatgataccattaggtatcttgttgaagccactttgggaattttacattaaaagataaaaatggacttaccaactgccagaaatctctgactaaacagtagacagttctaattttgtcctatgccatctaccacatcagaaatcatacaaatgcagtatttttatctttcacttgtatagcctctgccctcacttctttaacaagttcagcaatccaaaccaaagcaatctcacgatcacggttttgactctcactaccagtagtaagccgcgctatcagatcgattctttcgagtaagactatttcttctaatgaatctggcacctcatccctccgtcacacatataactgtgtttatatacagtatactatgcactttttaagaaaacttctatataaatatatggttttacttgagtaaaaaatcttggattaaaaagcatcctgttgaacaacaacccttttatgcataaaaacagcgaacacagcgcgtcacgctacatatttaattttcagtgtgacgcgtcacaacgatttaactgcactaattaataatctgttgatacctttggtctgccaacacgccgcctcaccccgtaaacaacacccattcggatcacccggcaaggtatcgccacatttgccacaacgttgtttatccagttcagccagttgctcttttagtcgctggttatcttgtcgaatcaggagcgcgatatattccggtaaatcgtaggctggccggaacagacgccgtgtggccatgccctcgattagcatcgcgtactcttctggctccagtcgggcgcggatctcattgataccggcagatttatcacgctggcgctgtgcctgtttgcgggtagttgcggcggttttagtcatggttttcctcacaggtagattaatcatcgaattccggccagtcggacagggccggatactgaataacaatgtcgccgaacgtcatttttgccccacgggctaacgattccagctcccatggttggacgctgatatcttttagctgcaggtcatagcggattttgggaatgcgctggcgttcttcgcgggttaaacgggccgatggcgcaataaggcggcccttggtggggttataactgcgttgcatcttgctaatgcgtggctgattttctttcattcgcgccacaatcgccctcacggcggcagtgtcggtgaagtcaataactgcatccggtgggtattccatcgccatcacaggcgttttagcctgcccgttggggtcatttggcgcttgggtgtttccacctaacccacagttattgacaggactccgaggcgcgccagaggcgctttttaaagtcaaaggctcaacgtcaacggcacccgaaacgatgcgccattgggttatgcgggtttcatgaacacggtcagcacctaaatgcggcgcgtagataccgacgactttctgtacttcctcgtcataggcgttgagttcatcggcgacgcgcttggctaaacggacagtctgatttccgcaattggtgccaccttgcgccgtgatgtaggcagcaaaatcaccctcgtcagccgcatggcgcacagcctcaacggtttcgtcgaaagtctcggctagactaatagaacgaatacggcggcactcgcgataaacgcccatggagggcagaccaatcgggcggaattgagggatacgccacgttgccgcccacgctgtcaccgccgcagcggagtcagttagaagctcgccggtttcatggtcacgttcaccctcaagcgcatagccgtcgatatttttggcaatgtatttagcgatgtagccagcggccccgcctttgttcatgtgcttgcattcaaagcggtatttagcggctccgcgctcgtcactgtcttctttcaacgcataccggcgcatgacgtcgataatctgttggcgctggcgacgctcacaaaacagcatcatgtgccagtgcggggttccgtcgtggtgcggctcaaccacccgcattccgtagacgcttaatttattgtctttaaaggcggtacgcattttgctccaaatgttgcagagataacgctgtccgtctttgggggaataggcctcatcgtcccacttgtggttaagctggactttctcgttatcccctttaccgataacgcgggtcgggtgatattttgacggggtggtgatggtcaggaacatgccgacgtgcttttgattggcagcatatttttcagtaaaagcaatggtgttcattagctccatacggcgaatttctggattagaaatactcgccatcaccttatcaatcaggtcgatgcgctcgccggtttcaatgttttctaactggcagcttttgagatattccaaattagactgacgacgagcgaacacctcacggatggcctgcttactggcataagacgacgccgacatatctcggctaacattaccgacagcaatcaataatgcttcccgccagcacatacgttgggctttaagtttccgctcccaccattcgggattaaccagtcgtgacagactggcgatagcagacgtgatatctaaccggcctttccggtatttgcgccagtgcatcggcgtgatattaaaagcgcgcgccattttggcaatatcgccgtatatccgtacctgtgtatcagcctgcaataaaacagacctgtcaccctgattggccttaatgcattcatcacaatgatggttgtacgccaccattaactcatcacctattttgcgggcaaagcggcgcagctctttatcatgcatacccgctaggctggcataggttggtgcatcagtggaaaagctcattgacgcactgaggcgcataacatttttactattgaccacctgaatacgcggccagatacgctggtcaaaaacaaacaccagccatttattagcatcgtttagccctttattggctaacaggtattcatagcgagaaatgaactggatacgcaggaagtgaggcaaattattgatattggctaaaacagcttgcccctgaatcagttgttcacgggtaagcggtcttgctggtgcaagggtttggcgtggtttgctgccggggtaggcataggcaggaacagcagcgccgctgcccggataaggcaacggcgctgctggggcaatgcgaccgcgcatattattagtgctggtcataagactgagtgattatgtgttcagcgatttggttaagcagctccgccgcctctacaccgttcaattctcggtttagaatttgattagcaatctcatccaaacgaaatgaaaccagcgcggcctgattctttctttcatccatgcgcgcttcatttagcattagctccactgattcaactgtcgtcattgttactgtactctcactgcccggcttggctgggtctacacccacccatatattttgtgctggatgagtgttattcaaaatgggatatctccatcaaaagaataaacatcgatagagtcgatgccatcaaatgaaagcatgacaaaattaggcgcagcaaaatcacatagagtaatatctgtaacttctaccacgactttacgcccggtatatatatctcttttaaaatcccactcagccaaaagcaaataatcaccaatagagtaatatcggtcatttttccgtaactcagctttttttctcccatcaattacagcttgataatactcaggcataatttctaattgatgaattataggtgatgctgtacattccttttcttttccccctgttattttattgttattttttgacttcacataaattaggtttgctgcagtcatagcacttgataaatgcccccttaacttaacctcattcacttccctatctatagggcaggtagttctcttaagatacgaaaaaacatcaccagcacgctcaatttcttccagaacggtatatatatctgtctttttcatttctataaccttattttaggtaatggaaaccccggcgagtaaaacgccatatatttcgattttggttaattaataatattcagtacgcagtcatcattactaataaatgacggtaacgaacgagtgaactcaattaaataatttaatgcttcaacaacactctctctttctgttggactcaattctgaaaacttcatattcacatgtcgtttttttaaaccagcatgaaagcaaattgttttacgcaaatgcgcaggcgacttatcaaaagcctcttgagcaatattctttctattacggaaatgtgtttcttttaattcagcaatacgagtaatacccgtcattcttaacttttcagattccgttaattgcaacatataacccccaattaacgcccgaacagacggcgtaatattggtgtcttctttgcagaggacagttcttgtaaaagcgccttttgattacttcccggcttccagcgctggccgctcttcaactccagcacaccgttaccgaaatggcgcaggtttaccgggctttgctgttttaacaatggggcaatagtaataatcataaagacacctcaactcaaaccggcgacagcactcaatccgctaataacatcaacggttgaagcaagcgcaggggttgactgaatacgacattgtaccgtcaggccaattaatgacagatggcgaatcgctgtattgaccgtatccagcagtgacgatttacgggaagcggtcttatgatcgccttgaacagcagcggcggcaatcaagccaacggcagcggtagcatgtagagcataagttgggatattaccgggacaggcttcattgactggcaccgatggcatgcaattgatttgtgccaacatggcatcaatcaagctggcgtcttctgttgcgtcagtgatcgcaagcaattcagtaaccgtaagatggtgtggctgttccgggttcagcttgttccgcaacgtttgcgcattcatatccaactgtttcgccaactgcgtcaaattgtgacgtgtcggaaactggcggcatacattgtcaaagtgcggatgtttagaaacagaaaaatcaaacatgtcacatccttaaaattcacttaaagtgaatacagattatcaatgatgagctgaaaacgagcatgaccgaatgcattgcgaagttgttcttctttccaacgcgcatagtaaatacgaatcgggccacctgctctcttacatcccttgcgaatcattcgcttttcaattggtacgcgagggttatcgccagtcgtccaacggtaagcggtacgttttgaaacaccctcaagttttgcgaacatttctaagctcactacaggagcaggaatttttataattgcgatttcagaagccatggtgcatgattccctatttgccaaagtttgtaagtgatgcgcctctgtttgccaacaccagccatcaattacgtaggtttagccaaaatatatctccatattgggagatagtaaataggttttgtcaaaatgagaattgattctttaggatggagcaacgtagatgtattggatagagtctgtttggcatatggattttctcagaaaattcaattagctaaccacttcgatatcgcgtctagttcgctgtctaatcgatacacccgtggagctatctcttacgactttgcagcacactgcgcacttgaaacgggggcaagccttagatggttattgaccggagaagggcaacaatttgaaggtaagtcttcatcatcggatacaaagagaatagaaaaattcacattatgtgaagaaatactcaaaagtgatggttatctgagtattgatgttcagctttttgggaagcctttatctgatggaattgctgttcgcactgatggaaaacttcactttatcgataaagcagcatcgttatcggacggtttgtggttggttgatattgatgagtctattagcattcgtgaactaacaaagctaccgggcaaaaaattacatgttgccggggggaaagtgccgtttgaatgcgggattgatgagatcaaattgatagggcgcgttacgggtatttacagcgaggttaactaatggctgtgcgtaagaaccctgctggcggctggatatgtgaactgtatcctaacggatcaaatggcaaacgcatcagaaagaagtttgccacaaaaggtgaagcactagcgtttgaacaatacaccgttcaaaacccgtggcaggaagaaaaagaagaaagacgcacattaaaagagctgattgacgcatggtatagcgctcacggcatcacacttaaagatggcctcagacgccagcaagcaatgcatcacgcttttgactgtatgggcgaacctcttgcgagagatttcgatgcgcaaatgttttcccgttacagggagaaaagattaaaaggtgagcacgcccgctcaaacagggtaaaggtggtatcaccccgtacactaaatcttgagctggcttatttccgagcggtatttaacgagcttaatcgactcggtgagtggaaaggtgaaaaccctttgaaaaatatgcgacctttccgcaccgaagaaatggaaatggcctggctaactcaagaccagattgcattgctgctcggtgagtgcaagcggcatgaccatccagatttagaaaccgtagtgagaatatgcctcgcgactggcgcgcgctggtctgaggccgagagtttaagaaaaagccagctcgcgaaatataaaatcacctacaccaacacaaaaggcagaaaaaaccgcaccgttcccatcagccaagagctttatgactctctgcctgatgataaaaaaggtcggttgtttagtgaatgttatggtgcgttccggtctgcattggaaagaacagacatcgaattaccggcaggacaacttacccacgttttgcgccacaccttcgctagtcattttatgatgaatgggggcaatatattagtactgcaaagaatacttggtcatacagacataaaaatgactatgcgatatgcacatttcgctcctgaacatcttgaagatgctaaactattaaatccattggtaaaaaaatgacaacactcgaaaaaataattcaatttatcaaagagcacaaatttctttctgtaatggtagctctaattactaccttcattttggcgatccctctcatactctatattacgaaattcaatgcttcactatccactgaccccaacaaatgggctgcatttggaacgtatgttggaggcgtatatgggccaatagcaacaataattagcattgccgtattaatccttaccgttgtagaaattaatcaatctaataaaattagtattgcggaagcaagaaacaataattttatcaatgagatagtcaagcttacagagatattatccaactgcctagataaaaaccctctaataatagacagaacttacttatttaaatggtttaataagcagatggtttcaaaatttgaaaaaaatcaccctgcagatgaatatgatatttggaaagaatgtataaaaaagttcactaatgatgaactctctcttttcgaaaatgaagttgcaatcacagaagagatactattaagaatccattttatagtggatgaagatctaaaagctagagctaggggtatctttaaagggataatcactaacaatgaacgattctggctcgaatgctacatacgtaggtttaacttccctttggttcattttttgtccctatggaactccttcagcatagttcctaaaacgttaagtgatatgatcatagacaaggaacttgaagagtttattcaggaatacagtggcgatatagtggcgatagatatggctaacaaacggtaataaatggcaaatagatgcaaactatgtcaatgataaataacgcaaaccattgattttcggttgttactgtaggaactcataatcgcttggtcactggttcaagtccagtaggggccaccaaattttagctgttaaatcagtatattaagccacttcttcgagagtggcttttttgttttaggggatttttttgtttttggggctaatgcccccaaagtgccgccagccaccagatctgcggttcgcgacgacagtttggtgctttacctattaaccggctttacctatttacctatttacctatttacctatttacctatttacctatttacctatttacctattttatcggcttaaccggcgatctctggtttttacaatttagtcttgcaggcctatctctcgttacgaaccttctgcgcggtagcacttctcatacagtttgccctggacgtaataccagagttcgttatccgaaataacttgtattgcctccggctgcccgctccccaacacatggtaataaatgctgccgtcttctttcttggcatagaaaatttcgtgtcccggacgctgtagcgataacaggttggcgtccctcgtcatctcaaggtgctcaaccttgctgtcaaacatctgattttcgcatacataatcactggccgatgcctggaaaacacataacgacatcgcagccatacccaacttccacaacattatatttctccctaacacggataggcttcctgagataaaagctatcacaatgataaaaaataataacctaaacgaaagctttaatataaatacctacatttaataatacatcttgcttatatctcatctgccaaacacccttaaatcagattttttcccattttttgtcctatatttatacgtgatattaacctgtgcaatggagccctgtgtttgggagataatatgaaaaagaaaatcttggttgttgtcaccagcgttgagaaataccctactcttgagcgcgcaaccggcctgtggcttggtgaagcagtgcattttgtgaaaaaactgcagaatgctggctatgaaattgactatgtcagccccaaaggcggctacacgccaattgacccccacagcctgagcatggcagataaaaccgattgggagtggtatcaaaacaaggactttatgaataagctcggcgcaacgctgaagccagaagaaattaaaccggaagattatgacgttatttattatgccggcggccacggcgtcgtgtgggacttcccggataataagccgctgcaagagatcagccgtaaaatatatgaaaatggcggcattgtctcgtcagtatgtcacggtgccgttggcctgctgaatattaaactgtcagacggttctctgctgattaaagataaaaccgtcaccggcttcagtaatgaagaagaaaagctggctgagctggataaatatgtcccgtatttgaccgaaactgaaatggttaaacgcggcgctcagtaccaaaaagcagacaaagcatgggacgctttcgccgtagctgatcgtcgggtgattaccggtcagaatccagcctctggcggtgcggttgccgacgaagtgctgaaagctctaggcaaataagtacaactcgtgcggtttgatccgccgtgataataagccactctctgcgagtggcttattagtttctatccgctatatcattgcctcaatatcatcaattctggctcatcttaatgaaatctgaagccttaaaaacccgcttacgcgggcttatgaataatgacatcactttggataattaacttttgcagtcgttaatccgtacatcgtttttatagatacagtttgaaaccagtttgccttcttcattccagacctgcgaagcgccctcctgtttaccagcaacataatttgtcaccatctcttttttaccatccgcataccagcgttttacggcaccgttcaattcaccgtctttataaggtttttcttctttcaactggccgttggaatgccactgtttcagaacgccaacctctttatgatcgttatcccactgccattgcagggtttgcacgccctcttcattccattgacccaggctacgctgcgcgcctttaacgtaaaagtctttgctttcaaccttaccatttgggtaatagctgatagaccaaccttccagcttgccgtctgcgaatacctgttcattacgtaaggtgccatcttcgtaatagcttttcgtcggcccatgcggctgcccttttacataggggttgctgctgcgcacttttccattcgggtaatattccagattagtgccgtcaaaaacgccgccccgataactaaatttggcggataacttacccttttcgtcatagctctcatcaataccatcaaccggtttatcattatggaaagtgctggatgtcgccttgcgcccgttctcatgataaagagtggttaaaccctcacgtaagccattggcgtctaagctgctgtctacgctgactttgccattgctgaagtaggttttatagggatgaaccattttgccggaagcaaaatcttccgcatcaatataaccttcaacgtgtagtttgccggtgttgacgtcgtagacttccattttccaggccttcagcttttggtcataaggcattggcattttttgtacgtactgagcgtcagcttctcttaccggctccagttcttcactcagataaagcatgcctttagtaaccgctttaggagcaaactctgggcaagtttgagcattgcaatcgtcagcgccgtgtaccatggctacgctgccctgacagtcagccagaaacatcagcattggagtttgatcgtccatcaacgctttgagcttgcccgcaactgagccaaactctttggctggcgcgccgatagactccggcgtgatgtaggcaatattgtttccgcaggcgtgcttggaagacagcgttaaccgcagcgccgggccgctgtaatccatacttgccggtaattttgcgttggcctccatgccaacaataatcgcaggatggtgagtttccaaacgcgcagccgctggccacattaatgcgatgctcagtgccgaacccacgcaaagattccagtgtttcattgactttcagttccctctaaggtgccgtttacggctaatttaagtgccaagctgctggcatatcgaacgcaatgtccgagttactctcagcagcgctatacaggctgctaatttttatagtgctattctattcgttggcgatattcatataaccagtcaattccagataaccaaagaatagagcgcaataatgtgaattatttatgattacgatgcagaaacgcacgaatgaccaacgtgccgtgcaccgtgagcatgctcagcacgattagtgccagccagaacgcacctattacctgccagggatgttcctcgggctgcaccaataccacaggaatagcgtcttttgataagccggtagcgccaataaaggacacatgatgctcaccggcgctgcttgcctgcgaacggaaaaaagccagaatgggcagccatccccccactttctcaggtggttgcaccaacaggtcttcccgattcaatcccacaatttttaccgcatgttcactgggaacaaaggacgcgacctgtttacgcagcaccggacgtatataaatccccatggcatccgcgctttgatccaacatttcgactttatgattactggggaatgccgcaggctgctcaaacgcccccaactctgacattgccagtaggtcataccaatcgtctgattccgtgccgtaagcgtcgttaatgctgattctcaggcgatctttcatatagttacaatcaacgttggtacaagcagtgttaatcattgccaacgcctgaggaatatttgccaaaaaaccataatgggtatcatcaacatagaattcaccggtcgccagacgcgccacggtctcatccaacggaatgatcggtaacgggtgcggagcatcccaaatcaggcggctacagtctgcatagacttcgcgatacggcttttgtgagcgagtttcatcggtgacgttaatggtttcaggtaaaatcatttcacagcgcgctgtcccttccaccgtaacccgctctcccggcggcaactgagcgtcccgtaaagccgtagaagaagtaaaatgaaccggttcgctacctgcaagttgatgataacccagggcaatccgagctaaaggcgcccgccattcgctccacgccacgcccagtaccagcaacgccacaatcatgatggaaacgtgatggcgccagaaccttggcctaacgttattcattccctgatcgatagcccgaccattgaaacgtagaacggtaaaatcttcggtactgagatgaacctcaacctcaccggcaggtgccgttacagcgccccaggattcagggaataccagcagcaggtggtctcccagccatagcaaaccctcctgctcatacactttccctcgcataatgttcaccgcgccaggaaggccgcgacgacgcagcagcaggaaatacccgagcggcagaaggcacgcagcagccccccaccaggcgatgatccactcggtggtcaatgtgctggccagtaatgctcctaaacctagcagaatcagaaacgtaggaaaaatacgccagccggaacctttgcgcagaataaattcactttcggtttctttgcgctgcctgattagcttgattggctcgctggaagaatcttctgcaatcgttcccggcgtacccttggcccagttctcccgcacggtttcagcgccgataagacgctccagtccctcttcaatcctgaaactgttgttgagggaaacaaccaacccaatgttgccgataaaaatcacttctgcccgattatggggctgtagaaacgcatctgggtcaaagggtaaatacacctcgacgccacccagagtttcatgctttacctgcccgccgccgctcaaaccgtggctggaatactcaccttcgataatccgcacgtcatgattattcagatcagacagatttggcggctggcgaaatggatccaatagcagcagcttatccgtcaccgggccgaaagttatctctatcgcggcgagttccgcgctggtcaggctgcgcacgacaggaagttgacgagcctgccgcagtttaaagcgatcgcgaaaacgcctaccgccatagatcagaacagaaataagggaaatagcgcagataaccaacggcaaaaactcgttaaaactcataatcctttacgactccagcttccatgctcaataaaatgttatcggctacacagaaaaatctaaaaccggtatcggcgcattaccgaaacacttgaaccttttctatcaatggatagagaggaaatattctataagcggctaatttaaccgacacatttatttacacggcgcatattatcagttcctgacaataccgaaagttatccttttctttggttctcatcttttattccttattttttataaggataaacaagtcttttcagccctatctgcgctttcaccacctttatgttcaaaaaaacgataacctgcggcgctccttaaaaccgcatattcatgacggctatcacattcgctacagagaaatttcccaagccagaccacagcgtctagattgaaataaaaatctcatccgaccacttgcccgagaagctgcgaggaggggaaataataataacaatttggtggtatctaatatcaccaaagcactcgatggagactgcaatgatcgcttatcccaacctgctcgccccgctggacctcggctttactacactaaaaaaccgcgttctgatgggctccatgcataccgggctggaagaactacccgatggacctgaacgtatggctcggttttatgccgaacgggcagctgctggcgttggcctaatcgtgaccggcggtatcgcgcccaataaaaaaggggtggtttatcaaggcggttcgatgctgagcgatgaaggtcaggtggctcatcatcaaattgtcaccgatgccgttcatcaggctggagggaaaatagcgctgcaaattcttcacgctggacgctatagctaccaaaaacagcccgtagctccttctgccctgcaagcgccaatcaatcctttttcacctcaggcacttactacggaagaaattgaacagaccatcgcggattttgctcgctgcgcgcggttggctcagctggcgggctatgatggcgtcgaaatcatgggctcagaaggttatctgattaatcagttcctcgccgctcgcaccaatcaacgtaccgatgaatggggcggaagttttgaaaaacggatgcgttttgccgtggaaattgtgcaggcagtgcgtcaggcaaccggtgagaaatttatactgatctatcggttatccatgctggatctggtagatgaaggctcagactggcatgaaatagaacaactggcgctggcaattgaacaagccggagccactctgattaacaccggtattggctggcatgaagcccggattccgaccatcgccaccatggtgccacgcgccggatttagctgggtaacgcgcaagttaatgggcaaagtcacgatcccattgatcaccaccaatcgcattaacgatccggcggtcgcagaaaaagtgctggccgacggctgtgccgatatggtttccatggcacgccctttcctcgccgatccggaatttgtccgaaaagcggcagaaaaccgagcggacgaaatcaatacctgtatcggctgcaatcaggcctgtctggatcagatatttgaaggcaagctgacctcttgtctggttaatcctcgcgcctgccgcgaaagcgagatgccgatacaagtgacacccgtacccaagcgcctggccgttattggctctggccctgccggtctggcttttgcgactaccgcagccagccgcgggcatcaggtgaccttatatgacgcagccgaccgcatcggtgggcaattcaatatcgcccgacagattcccggcaaagaagaatttaacgaaactttgcgttatttccggcgacagcttgaaattcaaggcgtgaatacgatgctagggaagcatattcaggctgcggaactggcagagtttgacgaagttattctggcctgtggcattgtgccacgcttacccgttattgagggaatcgagcacccgaaggttctcacttatctcgatgtattgcgtgataaaaaaccggttggtcaacgagtggctattatcggcgctggcggtatcggctttgatacggcggaatacctcagtcaatccggggaatcgaccagcctgaacagtgaggctttcaacgccgaatggggaattgaccaaagcttgaatcaccgcggaggtttggctcctcaaggccccgaactatcgccttctccacgccaaattttcctgttgcaacgtaaagcgagcaaagtgggcgaaggattgggaaaaaccaccggttggattcaccgcaccagcctgaccatgcgtggcgtaaaaatgctgaatggcgtgagctatgaccggattgatgatgaaggtttacacatgacccgcggcgagcaatcgacctgtctgccggtggataacgtgattatttgtgccggacaggagccacgcagagaactgtatcaaccgctgctggatatggggaaaaaggtgcatttaatcggtggagcagacgtggctgccgagttggatgcacggcgcgccatcgatcagggcacgcgattggctttagctatctaatattgcggatcaaaaaggggagcctcagctcccctctgcacgattaaaaatcgctgtaagacatatccaggctgcctgagccgccgccctcggaacgagagctggagctggttttcaccgctttcaatacgacaaatttctgattggaatcgatggtttcacagttaccaaacaggcgattcagcttatggtagtagtccaaatgacggttaccaacaatcattagctcaccaccggttttcaggcaacgtttcgcatcacaaaacatctgccaggcgacgtgatcactgacggtatgttgttgatggaaaggaggattacagaagaccatctgcaaactttcacgttctacgccagcaagaccgtggctcaccataaactcgcagcgcgccagatcctgcggcaaattgcgctcaatattcaaacggctggaagccaccgccatataagactcatccacgaacagcatttctgcatccggattctgctcaacggcaatcagcccgaccacgccgttcccacagcccagatcggccatttttccactcagattgtacggcaggttttccataaagaaacgcgcgccgatatccagattgttgcgagagaaaacgttagcgtgattatgaattacataatcagtgccgcccagcttccaatcggtggtttcaggtgtttctgtcagcggtaaatcagccacttcacagtgaatcagtcgcgcttttttccatgccaggctggttttggttgggcctaaaatacgctcaaacagctgcaaagtagaattgtgtacgtcacgggctttggcgccagcaataataatggtatcgggagccaccacgcgacgcagcgcctgaagttgatgttccagtaatgccaacgctttaggaatcttaatcacaaccaacgccggagcctcaggtaaggcatccatactgctcagcaaagtcaccgcgttatcatccagacggttcaaatgcagattgtgcgcggtacccaactggctcatataagaatcgctgacgctatacgggttggacgcgtgtaatgcacaggccaaagcaccaaattgatcgttgaacagcagcaccgggcgtccgccaactttactgatgtcgatgttttttaacagatattcatctgctgcttcccacgcctgtaggttgctggaatcttcctgctgtgggaaacgttcaagtcttaggctttgcgtttccagatcgagttggctcatcgccgctcctgaatgataaatttgggctgtttatcccctaaaaagggcgatcagtaaattgttttttcgtgaataagggttttattgatactgggctaaccagaggggaattcttcttatagttatattattgatgcatagagatatatttaaataacgaataaacctcaaaaaattctacagtttatcccatttttagttctctaaggatattgcagctatcaaatcgaaataggcaaatatacaatccgccaacttattacaatcggaaaggttatatagtcaataccgataatacattattaatgaaacaaattaaagaactaattaatgggaaactgcctgtgcaattttctatgcttatccagcaatataaccacggaaggtactcactcatggatctattcagcgctttgccctacacaatcccgccaagttcgcgtttataccaaactcaacactctaaagcctttcatcgtaattggtgtgccagaggcattgccattgcgctgttggcaatgagtagtgctaacgccagcacgacttcttgggcttctctgccgaccttcgagccacctagcgcactgagcattcagcctcaggctgtttacttgtcagcagctactccccattggcctactgcaactccgcgctggcctgctgctgctccccgttggcctgccagtcgaatcgatactcctgtcaatgatgttgtggaaatcatcacttctggtgttgaacatattcatgagttcctgatcaaagaattcaacaatgaactttatctacaatttaagattgcaggtgctctatcctctataacgccacttaatcatttatctcctgcgttaggaattaatgttactgatgatcttattacagaagaaaacatttataaccatatcaatagctcggccagtcccaaatctattgatgcatcttcagatgaagatatgaatcaaaacaaaacaaccgaagtagcggttaataccccccctcagcatgttgatgtcgttcccaacgacgtaatacacccggttgtgattaatccaaatttgaataacgatatctggacaatagatgatgagtccatcattgaaagtttatctttgagcaataactcaaaaatagtcattttgcccagcagcgaactggggagttatattttttacatgaacgagtaccaatctgataatagccaaaatgaaatacacttccacacacaaattggtaataacgaatacccaggtggatatctttggattaatagtgacagcgcaggcacaacttttgtcactatccataatcaccgagtcaacgaatcaataaataaacacgatcaggatattcaactcatagaggtttcaggcgaaataaaaggcaactttattcagcgtggtcgcgttatatccggcgcttatgattatcgattgttacgcgacgggccagctggcaaaagctggtatctcaccaataaggtctccctggatcctaaagtggcaaactctaccgcacgggtgtaccgcccagaagcggcaggttatatagccaaccagatagccgctaacaaactctttatcagcgatattcacgatcgctttaatcaaaccgattatgtagatcctctcagcggccagaaaatgacgcccccaatgtggatgaaaacatccgcaggtattcatcgttttaaggattcatcgggccagttggccagtaaatccacatattcctctattcagttaggcgatatcttgaaccaatggtcaaccaacgataacgatgttggatactttggtattactggcggatatggaaaggccaatgctaatagcgaatcgaatattaccggttatcgcgcccattccaacactcacggatataacttggggctttacaccacatggtttgccgatcgctccactaagctaggtgcctatattgatattctggggcaatatagctggtttaaaaatagcgtcgaaacccagggagaaggtaatgaatcatataaaagtaagggatttactacctctatagaaactggttttaaacacccactgattgatcaggaacagtttggtttatttatccaacctaaagctcaggccgtttggcagggaattaaagctaaaaatcatgttgatgcttatggcacgctgatttcacctaaagacaaccaccattggatgacaaacgtcggcttacgcagttatatgcagatcaactctggcacgctgtcggagaaacgcacactgtcagtcaaaccttatctggagacaaactggatccataatagcaaagctgcgggaatcattatggataacgcaaaaattgatcgttcgggtggaaagcatatcgcagaagttaagttaggtattgaaggcatctttaataaagatcttaacatctggggtaatttaggccatcaaatgggcaaacaaggctactctgacaccaatgcgggtcttggcatgaaataccaattctaaacggcctccagtgccgggcgcgcactcaaaacgctatcccggccttggtgcatttttgtttaatttagctgaaaacggtactatcggctgattacttccaacgtaaagccatcatcgttaaaatcctaacggtgaggcttatcagccagagcatactcagatgcaggaattgacctatctgcaaggttatcccgaacagttgcaaacccaggttcgtcagttaatcaccgaacaacgtttggggcaggttcttcgcagccgttatcctcaaccgcatgattacaatacggataagtcactttatcagtacaccatggatctgaagaaccagtacctgcgtaacgctcaaccgctgagcaaagtggcttacgacagcaaaatccaagtaatgaaacacgcattggggctacataccgccatttcacggattcagggagggaaattaaaagccaaggctgaaattcgcgtagcgacggtatttaaaaatgcgcctgagcctttcctgaaaatgattgtggtgcatgaattggcgcacttaaaagaaaaagagcacaacaaagccttttatagcctgtgttgtcacatggaaccgcaatatcatcagttagagttcgatacccggctttatctgacccaattatctctgtttggcgatatttactaaccgcttaattgacctaacggcatcaataaattctcatcgtcagccctttttctggcggcggttcaatgactgacacagtacacagatacggagcttttatgattcgctttgctgttattggcacaaactggattaccgaacggtttattgatgccgcccacgcaagtggcaagatgtcgttggctgcggtctactcacgtcaattggagcaggcgcaaaatttcggcaataaatttggggtcagcgcctgttttcattctctggaacacctagcccagagcaacgaggtagatgcggtttatatcgccagccccaactctctgcactattcccaagccttgctgttactcagtcataaaaagcacgtaatttgcgaaaaatctctggcctctaatctggccgaggttgaagccttaattgcctgcgccaaaaaatatcaggtcatactcttcgaagcgtttaaaactgcctatttgcctaattttattcagctgcaaaatgcgttgcccaagttaggccagttacgcaaagcctttatcaatttttgccagtattcctctcgctatcagcgttatttaaatggcgaaaatcctaataccttcaatcccgctttttctaacggctcgattatggatatcggctattactgtctggcaagcgccatcgcgctatggggagaacctcagagcgtacaggctagcgccactctgctgcccagcggagtcgacgctcacggtacggtctgcctgaattacggtgaattcgacgtcgtattattccattccaaagtcagccaatctcatattcctagcgaaattcagggcgaagacggcacgctagttattgaaagaatctctgagtgccacagcatcacctatactccaagaggtcaggagatacaggatctgacgctaccgcagtatgaaaataatatgaggtatgaagctgaagccttcgccgatttgattgctaaaaatcaggttgagcatccaggtttagcgctttcagtcagcaccgcgcgccttcaaactgaaattcgtcgccagactggcgtagttttccctgcggattcgcagcaagcatcatcattaaaatgaataggtgtgattgaccaacgccctcttttgaattaattttggtgctgcaaaggggagtaacttcattgccggtttgccgtcattacggtgcgaaagcactcggttaccgggcaacctcatcatgtagaagcaattaaatcgcttttacatcatcagggttgtaagtgagaccttgccggaaggcgaggtttgcttgcagctcagacatagcggctggcgtcttccgacgttggccgttttgtttttttatgaggtttactctgatgatgaactccgttggtacgcccgtactttgggtcggttttgccgttgtagtcgcgattatgctcgccgttgatcttttccttcagggccgtcgcggctctcaaaccatgacgctacgtcaggccgccgcctggtcgttggtatgggtgagcctggctatgctgtttaacgccggtttctggtggtatctgagcgaaagcgtagggcgcgaaattgcggataagcaggcgctcgctttcctgaccggctatctgattgaaaaagccttagcggtcgataatgtctttgtctggctgatgctattcagctattttgccgttcctgccaatctacagcgacgcatcctgatctacggcgtacttggggcaatcgtgctgcgaacggcaatgatcttcgcaggtagctggctggtttcgcaatttagctggattctttatctgttcggtgccttcctgttattcaccggcctgaaaatggcatttggcaaagaggataacagccccattggtgataaacccttagtgcgctggattcgcaatcacttacgcatgactgacgaactccacggcgaacgtttcgtcattcgcaaaaatggtctgttgtacgcgacacctttggtgctggtgctgattctggttgagctgagcgacgtcatttttgccgtcgacagcattccagcaatctttgccatcaccaccgatccctttattgtgctgacttctaacctgttcgcgattctcggcctgcgcgccatgtatttcctgctagcaaacgtggcggagcgcttctcgctattgaaatacggtctggcagcgattctggtgtttatcggaatcaaaatgatgatcatcgatctgttccatattcctatcggcatctctcttggcgtagttgccggtattctagccctcactttactagtgaatgcctgggtgaatcaccgcgccgatcaaaatacaccacactaactatgtgactatctgcctgataatctattacacggggtgtctgtcaccccgtatttatttggcagataccactaatcgccaaatgttatcttgatcacacatatgtaaacaaaatgttatgcaaagtgatcaacattatatttccctaattgtttctttccagcctattccattcccttatactaaccctgcaaacacacttggttacaggtttgaagaaaaagtacccggtcaggttccggccgaggtatgaagcctgtacaacgtcattcaacacagcgacattcagttcactgggaagaggtaaattgatatttatggaaaacaaaaaatcagggctatttcactacttaagccacggaagtctggttaaacagatattggtgggtttggttgccggtatcattctggcaagcgtttcacaatcagccgctgtcgcggtaggcctgttaggcaccttgtttgtcggcgcattgaaggccgtcgccccggtattagtattgatgctggtaatggcttctatcgcaaatcataagcagggtcagaaaaccagtattcgccctatcctgttcctgtacttgttaggaaccttctcggcggccctgattgccgtcgccgtgagtttcatgttcccttcgacgctggtattggcaaccaataatgccgatatctcccctccgggcggcattgttgaagtattacgtgggctattactgagcatcgttgccaacccgattcatgcgctattgaacggcaattacatcggtattctggcttgggcggtcggtttaggctttgctctgcgtcatggctcagagactaccaagtctttgatttctgatatgtctcacgccgttaccttcgtggtacgagtggtgattcgctttgctcctctgggtatttttggtctggtagcttctactctggcagaaactggcttcggcgtattactgggctatgtgcaactgctggtcgtattgatcggctgtatgcttctggtagcactggtggttaacccactgattgttttctggaaaattcgccgtaatccttacccactggtgtttgcctgcctgcgtgaaagcggtgtaaccgcattctttacccgtagctctgcggccaacattccagtgaacatggaactttgtaaaaagctgaatctgaacgaagatacctattcagtttccattccactgggtgccaccatcaatatggccggcgcggcaattaccatcaccgtgttgacgctggcagcggtacatacgttgggtattgcggttgatttgccgacggcattattgctcagcgtagtcgcggctgtgtgcgcctgtggcgcttccggtgtggctggtggttcgttgctgttgattccgctagcctgcggtttattcggtattccaaatgaaatcgccatgcaggtagttgctgtaggctttatcattggcgtattgcaggattcggcagaaaccgcgctgaactcctctaccgatgtgctgtttaccgccgcagcctgtcaggctgacgatgccaaactggctaatccagacccgctggcaacgcgttaaatctcaagattctcacttatccaaagggtggcaaaagccgccctttttatcctttcttttcgaccagaaaaggatcgatgccctgcaattgcaagcgacggaagcggatgatattaaagccgttaatcagcaggaaactcccttcaatcagcgatccgccaatcgaacccagccagatattatgaattacccaacaggcggttgagcaccacataatacagcgcgtggttaagccgtgagtgcggaacagcgcccaagtactggctacggtgccaattatcggcaaaagctctactacgtgatgcattcgccacaaacctaacgttagtgtcagaatgataaacacaaccatcactatgctgctacgagtcttggtcgagatcagggtgcgtagagcgttaagcaatgcactgctgcctgctgcactggctcccatcagaaagaaatggccaccgatgatggcgctataagccgaaagttgcagtttgaaacgtcgttcatcccggttgaaaaacatggtaataccgacaaaaaatgccaatacgccaacagcttgggcaaaccaatagaacgtcatggtggggtattcctggtataggggagtccctatctcttctggagtcgaacatagctaaaacgacgcgcttaccgctaatcggggcccacggtaagcgcgcgaaaaatgaaatgtcgttttattttaatggttaaccatactagttacaaggtgactccgcttttaaaaatagctaattcacggaaatcattggcttcattgcgcgccggtttgccattggcaatggcgacgatcagttcgacgaactcttccagtaaaacatccattgaagtccctttgattagttttcccgcatcaaagtcgatccagtgaggttttttcgccgccaactcgctgttggtagccagtttcaccgtaggcacgaaaccaccataaggcgtacctcgaccggtgctgaatagcaccatatgacagcctgcccccgccagcgcactggttgccaccgcatcattccccggagcgctgagcaagttcagccccggacgttgcaggcgctcgccgtacttcagcacgtcgaccactttgctttgccctgctttttgggtgcagcccaacgatttttcttccagcgtagtaatgccgccagccttattacccggtgacggattttcgtaaattggctgatgatgagcgatgaaatactgtttaaaatcattcaccatgctaacagtcttttcaaaggtagactcatcgcgacaacggctcatcaaaatgcgttctgcaccaaacatttctggtacttcagtcaaaaccgaagtgccaccgttggcaatcacataatcggagaaacgccccaagagtgggttagccgtgataccggacaaaccgtccgaaccaccgcattccaggccaaatttcagttcgctgagttgacccggcacacgcgggtcgctgcgcattacctgatatagttctcgcagtcgttccaagccagcttccacttcgtcgtcctgctgctggcacaccataaagcgaacccgctcattgtccacttctcccagcgtagtttggaaaacgtcgacctgattgttctcgcagcctaaacctataactaataccgcaccggcattaggatggcgcaccatattttgcagcatggttcgggtattttcgtgatcctgaccaagctgtgaacagccgaacggatggctaaacaaatgcaccccgtcaatgccttccgcctcgttggtttccttcagaaaacgctgttggatctgacgcgcgataccgttaacgcagccaacggttggaatgatccacaattcgttacgaatgcccacgtcgccatttttgcgacgatagatccgaacttctcgatcggccatttgcaccggcagatcgctaaattctggctgatattggtattcatccaagtcacttaaattggttttagcgttttgagaatgaatatgttcaccggtttgaatcgggctaagtgcatgacctatcggcaaaccatatttcacaatcatttgatccggctggattaaagttagcgcaaacttatgcccgcgggtcactggctgcgccagcgtgattgcatcgccatcaattttgatgacttctccctgcgccagatcctgtagagcaacggctacattatccagtgggtgaatttttatcgtcttttgcatagaaaacctttagctgtaagccgcaaccgctgctctcattccacgatccaggatagtttgcagttgctctgtcacctgttcggccaactggggtactgcagttaaatcctgcccccaatgattcgcatcagacaaaacggtctgaaccaatgcggcgggagtcgtttcgtattgcttcacactgctccataagcgagagtaggtttccagccagtgagcgtcgtcttgcaacggataggattctccttgacgttccccgcgataaaaggcgagcaacgcggctaatgcaaaggttaaacgcggcggcagcttgcccttttgctgctggtaagccagcagctgaggcaaaatgcgggtacggaatttggtcataccgttcaacgcaatagacaataactggtgctgaatgaaagggttacggaaacggcttaataccgcctgcgagaaggaaagcagttcatcctcaggtaaatccaaaaccggaacgatttcttcaatcatggttttttccacgaactgactgatttcagaatcattcatggtttgcccaacggtatccagaccggccagataagcgataggcaccagcgctgtgtgagcaccgttcaaaatggcgactttacgctctttatacggcttgatgtcatccacgatgcacacattcagatccagttgatccagacgcaactcttttgccaaccactgtggcccttgaataacaaagagatagaagtattccgccgtatcgaggaagctgtcctgatagcccaattcagcctgtaaagcggtcacttcatcgcggggataaccggtcacaatccgatccaccaacgttgagcaaaaagtattattttctgttagccaacgggtaaatccagacggtaactgccaatgctccgcatagcgcagcaccagttcccgcaaggcttcgccgttataatcgattaattcacagggcaacaacacccagcctttatctgccgcgccgtcaaaatgcgtatagcgctcaaataataagcgagtcagcttagctggaaatgacgccggtggcgcatcatccggtttatcttgctcattccaggcgataccggcttcggtcgtattggaaaaaacaaagcgaatattagcatcgcgagccagtgccagatactcgtcgaattgacgatagatattgatctcccgattcaccgaacggatcagccgagattcccgcaccgcttccccctgctcattcagaccgcgaatgaccgtggtatacaggccatcctgcgtactcaaggacggaggaaaatccgtatctattggccggatcactacgatcccagcgttaagatcggtatgttcgttcaaaaggtccagttgccaatcgacaaaggcgcgcaggaaattgccttcgccaaattgaataactttgtcagggtaactgcggccgggaaaatcacgacggttcagggttagcatgttgatctacctcataacgcgttccgccatagacaggccacgggcgataaaccggcatcatatgcacagcccgtcgctttccgtcccgcagacagcgttgaattaagcaaaagtttgaaaggcgggaggccgattggcgctcccgcttggcacattacaattcgatagtgaaatactgtttggcgttatcgaaacagatgtttttcaccatcgcacccagcagttcaatgtctgccggtgcttcaccacctgccacccagcggccaatcatctgacacagtattcggcggaaatattcatgacgtgtataagagaggaagctgcggctatcggtcagcataccgacaaagcggcttagcaaacccagctgcgccagttgggtcatttggcgctgcataccgtctttttgatcgttgaaccaccagccggaaccgaactgcattttccctgcggcaccttcgccctggaaattgccgaccatagtgccaatgacttcgttatcgcgtggattcaggcagtacaggatcgttttcggtagcgcattacgcagaccttgcgcatccagcaaacgggaaagcggctgagccagcggctggtcattaatcgagtcaaaaccgatatctgggccaaccagattgaacatgcgactgttgttattacgcagcgcaccgatgtgatattgctgaacccattcacgacgatgatattcaccagataaaaatagcaacacagcggttttaaactgagccacttcttccagcgttggctgagttcccgtcagacgacgagctagaataccgtcgagcgtcgtttcgtctgcttcaccatagaccaccacgtccaacgcatggtcagagactttacagccgtgagcggcaaagtgatccatacgtttgttcaatgcgtcgcacaggtcggagaatttacttatagacgtatctgccgcagcttccagcagcttcaggtaatcgcgaaaaccggcggcttcaatattgaaggctttatccggacgccaacttggcaacactttgatgttaaagctgccatccgcggcgatagctttgtggtggcgcagatcgtcaataggatcatcggtggtgccgaccattttgacattcatctgttgcatgataccgcgcgcagagaaagccggttgagccaacagctcattgccacgttgccagatttcttccgatgttttcggcgaaagcagtttgccggtaataccgaaaggacgacgtaattccagatgagtccagtgatacagaggattgccaattgtgtgagggacggttgcggcccaagcttcgaatttttcccgatcgctggcatcgccagtacagaatcgttcggcaacgccgttggtacgcatagcgcgccatttatagtgatcgcccttcagccagatgtcatacaggttcttaaaacgatagtcttctgcgatttgttccggtggtaaatggcagtgatagtcataaatcggctgatcttttgcataatcgtgatacagacgacgggcaaactcggtatccagcaaaaaatcttcggttaaaaactgcgacatattggcttcctcacatggctacatcgtagagcactgttttctgttatcgcgaagttatcacaccaattccacttaccgtccagcactttttacaagacagtgatcgcaaaaacctaacaaaatgaacaaatactcaacattttctattatttagtcccttgcagcactaaggctgacgagttctattattccctaattgaaaagtggtttttgtgatgtcactcaacttttaaatctgtatgacaagttattgttgcgtcgccctgagttgtcttatggatacgcatcatgagagttcaggggaaaccaaatcgaaaaaattacaggtcgtcggtgaagggatacatcgtcagtgtcatttttctaacggcttaggaccgtggtgataccaggcatcgcaaccttaggggcatcagcttgatttaaccccctcggcgttgagagacacgatcaaaaaaggagcgtttaggtaccaccgggtgcacgggcatcgactggatggaccaaattgcgccatggactgccgccagacagcactccatagcagtaatcttagagactgggagagatttagaaatgcgtaaaattaaagggttacgctggtacatgatagccttggtcaccatgggcacgattttgggttatctgacacgtaacgccatcgccgtcgccgcacctacgcttcaagaacagctacatatcactacgcaacagtattcttatattatcgccgcttattccgccgcttacactttgatgcagccggttgcaggttacgtactggacgtcatgggaaccaaaatcggctacgccatgttcgccgttatgtgggcgatattctgtatgggtaccgcgttagccagcagttggggcggcctggccattgcccgtggtgccgtgggtgcagctgaagcagccatgatccccgcaggcttgaaagccagtagcgaatggttcccggcgaaagagcgttctattgccgttggttattttaacgtcggttcatccattggcggaatgattgctccaccgttagtggtctgggctatagtcatgcacagctggcaaatggctttcatcattaccggtgtgctcagcctgatttgggctatctgttggttaattttctataaacacccgaaagatcagaaacgactgacggatgaagaacgggactatattctcagcggtcaggaagctcaccactccacctccaactcgaaaaagatgtctgcaatgcagattatccgtaaccgccaattctggggtatagccatcccacgctttctggcagaaccggcttgggggacgttcaatgcctggattccactattcatgttcaaagcctatggctttaacctgaaagaaattgcgatgtttgcctggatgccaatgctgtttgctgaccttggctgtattctcggtggctatctgcctccgttgttccaaaaatacctgaaagtgaatctgattgtttctcgtaaattggttgtgactatgggcggtctgctaatgattgcgcctggcactatcggcctgttcactagtccttatgtcgctattgctctgctgtgtatcggtggttttgctcaccagtctctatctggcgcgctgattaccctgtcttccgatgtcttcggtcgtaacgaagtcgccactgccaacgggttaaccggcatggcagcctggactgccagtacgctgtttgctctggtggttggcgcattagcagatacgttgggcttcagcccactatttgccgcgctggcggtgttcgacgtactggcagtcatcgttatctggacggtgctgcaaaatcgccctgccgatgactcacagacagatccgatacaacaagcaccggctgagcaaaattaacccgtccggcgacgttctccaagagtgacgcactgcgcacacactagcccggcagaagcttgccgggtttgtttttctccgccctacactacctttggttaagtatatctgtgatagcaatagctagaaccaatcgggaataagtggtataacaagtccgcgagatatgccgttcgggatagcctccaagccctgacaacactgagtcataacattatctgcctcaattgatccaagagccttaatcatggaattcacagataccagacggttataccaacagttggccgcagagttaaaacgacgcatcgaagctggtgtgtatcaggttggcgataagttgcctgctgagcgctatatttcggaagaaatgaatgtcagcagaaccgtcgtccgtgaagcgattattatgctggaagtcgagggctacgtagaagtacgcaaaggctctggcatccacgtcatgtccaatcagcagaagcatttggtcatgccaagcaatgaaattgagttcgctgctgccggtccttttgagctacttcaggcgcgccagttaattgaaagcaatatcgccgagtttgcagcaacgcaaatcactcgtcaggatatagtcaaactgattgaaatacaggaacacgctcgtcaggaagatcgttttcgggattcacaatgggatttgaaattccatgtgcaggtcgctctggctacccaaaataccgcgatggccactatcgtcgagaaaatgtggagccaacgggtgcataatccgtattggatcaaactgcatgagcacattgacgataaatccattgagagctggtgcgaagatcacgatcagatcctgaaagcgttaatgcgtaaagatccttatgccagcaaactggcaatgtggcagcatctggaaaacaccaagcaaatgctgttccatgccaccactgatgatttcgaatttaacgtcgatcgttatttatttgcagaaaatccagtggttcatctggataatcttgcggccaacaatatgacgataaacagcaaagcctgagctgaatagtctccccgctactattacctacgtttttccgcaggaagaatcgaaaaataaaagggataccgcctgcaaaaattgcggtttccctcttataaccttgcattggcgggatcactctagtcagtaaatgtcgagatctgtcagcaaatgtaagcagagaagctatttcttaaaagcggtacaataaaccatcaattaacgcctatatttccctgtttcatatcctgctattttgctaaagtgactgctcttttttttcccgccactttgggagcgaaacgcgaaagatgcgctggttgttgatcctgcttattgctgtttcttgctggaccggttcggtcgccagcaagccgctattggctgggcattctgattccacgcaggacgtttcttataccgcccttcagcgcgccgcaattcaatacattaatgttgaattcattactcaaaacgtcttccgacataatgcgccattgcccgaccagctgcgtcttggcaagcggatcaaaaatttctcaattaaaaaccgtctgagcacatctaaattcaccggaacaggcaatactttatgggtaaacctgagttggcatccgtcctggttcctaacttcacgcaatgctcaggcaaaagaaatctataagcagtcccgacaaccgtcaccattacgccaatctggccgctggatgcttcattcagctgcgcagcaaaatcgcgtgggcggctggaaagagagtaatatcctgtacagcggtgcactgacttatcacgacgccgcaattctgtttccattgtcataaaaatttataagcaaaaaatagatttactgcatacgcatcaacggattggttcactttggaagtatcagcacctttatctgaaccgccgcgtgagcgcaacaaaaacaatgacgttttaggaataccagatggatatcattaaagaactcttacatgccttgtggcagcaggactacgaaacactcgctaacccttcgttggtgtgggccatttatatcctgctgtttgtcatactatttctggaaaatggcctgctgccagcagcatttttacccggcgatagcctgctgattctggtcggcgtactgattgccaaaggggcaatgagtttcccggtcacgctagtggttctgactaccgccgccagtttaggctgttgggtcagctacatacagggaagatggctgggaaataccaagatagtgcagggttggttatcccatttacctgctcactatcacacccgcgcgcataatttattccaccgccacggtttgtccgccctgctaattggccgttttttagctttcgtccggacactgttacccacaattgctggcctttctggcctgagcaacgctcgtttccagttctttaactgggtcagcggcctgctttgggtactgattctgactacattggggttcgcgttgggtaaaacgccggtattccgcaaatacgaagatgaagtcatgttcttcctaatgctgctaccgctagcgttattgtttatcggcctatttggttctctgtacgtactgtggcgtaaaaagcgcagcgtgcagggtgataaaggaaatcaggcgtgatccagcttctggctcgtttgcgccgcccacgctggcactatgcggtgctagcgttaggtatgctggtgcttgtcgcgctgtttacccccgtgatactgcatactgaaagcgccctgaaaatcagccctaatcaacaagggctgagtcttccggacggcttctacctttatcaacatctggacgaacgaggcattcggattaaaagcattacgccggaggccgatagtttggtggtaagtctggaatcaccggagcagcagaaagaagccattgaagcattgcaggctattttgccgaagggctacgtcatcgtgctgagtgaatcaaccaaacgtcatagctggctgccaaagtttggcggtgatacgcaaaaaataggctagctcaatcctctgtcgggggaaactctcccccgtccctctgatgtcatttctccccgcgtgctctgattactcttcgatatgtaaccgataggtttcgcgctgccgctaaccacgcaacaatttgaaaaatgaaagggattccccaatataacccaatagaaaacttgggcgatgttctattcagcgctatgcttaacttaagtgcggttatcgccattactgatatgtcccatttattaagcggcatggaactaagacacaccgttgtcttcaggctgcaaaaaggaagaaatattatgttgttacgccattcccttctgctggttttaccggttgttgcattctgcggcctggctcaggctgctaccgctaacggctgcgatatcaaagcgaaagaaattcagcagcagatcgattatgccaaacagcatggtaatacccagcgcgttgccgggctggaaacggctctgaaagaagtgaaatccaactgtactgaagccggtttacaggctgagcatcagcaaaaagttgctcagaaacagcagaaagttgccgagcgtcagcaagagctgaagcaggcgcaggaaaccggtgacgcaaagaaaatcgccaaaaagcagaagaagctggacgaagcccaaaccgagctaaagcaacttcaggctgaatagatattattcatcgcttttggtagtcaaaaatctggttaaaaagccattttatggtgttttttaggacgaatccgcaggcggattagcatgattttccacaggttggcctttcaaccgctcagaaaatccgctatgttagatattcttctcagttatgttaaggagttatttatatggcacaagataaaaacgctgaaaatttgcgcgccgaactcaaatcactggcagatacattggaagaagttttgcattcctcctctgataagccaaaagctgagttagataaattacgatccaaagctgagagtgccctaaaggacactcgtgagcgcctgagcgaaaccggcgacaaaattgcggctcagaccaaagaaatcgccgacaaggctgataactacgttcatgacaacccttggacaggtgttggtatcggtgccgcagttggcgtggtattgggcgttctgttgtctcgtcgctaattatggcagagcaacctcgcacacagggccccggtaaaggggtccttgataccatccatcgcatcgccactatcgtggttggcatggttgaaacccgcgttcgactggcggtaattgagctggaagaggaaaaggcaacgctgattcagttgctgataatggccggaatcactctgctattaaccgcttttggtttaatgagcctgctggtgttaatgatgtgggccgttgatcccgtctaccgctttatggctttggctatcaccaccggcgtgctgttggggctagcgttgataggtgttatctggacgctggttaaagctcgtcgttccacgtttttgggttctacccgtcaacaattggaaatcgatcgggaattattggagaaagaccagtgagccgccagttacggttagagaaggaaaagttgctgcgtcagattgaacagcaacgcctggatctggctaacagcgcggcacactggattgaagtgaccgcgccttatgatcgcggctggctcaaaattcttgaaatgcgtaagtttctggttctgggttccagtctgatcgcagtttatggcgttcgccatcccagccgaatgattcgctggtcccgcagggcgttaagcgcgtggggtaccttccgacttttccgtcgcacattttcttcccgctaaactcgcctgtcgccactgtctcagacggcgagttttattaactcattcaatttattatttattttttattctcaacccttccacttatctttatcggctaacctttttcgcactttttgttaaacccatcaatttttttgataaaaacaaacagtattacttgctaacaactttcctacctccctactaacatattattcatcaacccggtatgaagctggaaagccaacggattgccacgaaatattgccgctaatgttaagcattagcatcaacccttatttggagtaagtagtcgatgaataaattacaagataccggtctgttggttgcacgtattctgatgccaattctgtttattgttgccggttacggaaaaatgggcgatgcctatgctggaactcagcaatatatgcagatgatgggcgttcccggcttcttcttgccattgactatcttgctggaatttggcggcggtctagcgattctgtttggtttcctgacccgtactaccgctctgtttaccgcgggcttcacgttgttaaccgcgctgattttccacacaaactttgcggaaggcgtaaaccagctgatgttcatgaaaaacctgaccatcgccggtggcttcctggtgctggccgttgcaggtcctggcgcattcagtattgaccgtctgctgggcaaaaagtggtaactttcccccgcggctaatatccgacgccctatctgatggtagggcgttgttattttgtcgccttactgacgaatggattaatacggcgttgctaatccaaacttatttcgccttcctctgctctctgcgctataaaattcgtgattacctctaaatacacaggagtacccaatgggacaactagttgacggcgtttggcaagacatctggtacgacactaagtcaaccggcggccatttcaaacgtagcacctcacaattccgtcattggataacccctgatggccagcccggccctcacggccgcggcggctttaatgcggaaaaagatcgttatcatttatacgtttcccttgcctgcccttgggcgcatcgcgctttattaatgcgcagccttaaagggttagaatcccttattccggtttcagtcgtacatccattaatgttggataaaggttggacctttagcaccgacgtccctgataccaccggagattccctttaccaatcggattacctctaccagttgtatttacgtgcagaacccacttatagcggacgagtgaccgtccccatactttgggataagcagcagcaaaccatcgttagcaacgaatccgccgatatcatgcgtatttttaatagtgcatttgatggtgtaggtgccgccaagggggattattatcccgaagcgctgcgtgaggaaatcgaagaaattaacggttgggtctacgatgcggtaaataatggtgtatacaaagccggttttgccaccagccagaacgcctacgatgaagcggtaaatacgttgtttgtggcgttggataaattggaattaattctggaccagcagcgttatttaactggcaatcaactgactgaagctgatttacgtttgtggaccactttagttcgttttgatcctgtctatgtcacccactttaaatgtgataaacgccgaattagtgattatccgaacttattcggtttcctacgagatatttaccagatgccaggcattgctggcaccgttagcttgccacatattcgcaatcattattatcgtagtcatgccacgattaatccctacggtattatttccgtcgggccagaacaggatttattgtcggcccacgggcgagatgttcgttttggttcagagtaatagtctaacccaataccctgttataccttttttactcggacgggcgaccagcgcccgtctcactatattcctaaccgcgccccagtaatttaggaatttcccgcaggcaccaggacttagcctcgcccatactgtctcgccgccaggccataataatatccacttctcggctgtactccggcccaacaacccgtaagcgacccgcttcgatatctttttcgaccatttcataaggcatggtcgccacgcctaatccggccagcaacgcgcgtcgtttatcttcaatagtactgaccgttaaacgctgctgtttatccaataactgaacggtaatgaccgggcgctcgcgagcggtatctgccacggcaatacctcgatatttaacccgagtcacttccgagagcggctccggttcctgatggattggatgatctgggctggccacgtagacgctggttactttatataattttcgtgaattgatttctgaagaagcgcggaaatgcatatctggtgcgataacaatatcagcacgcccctgctccaatcgctcccaggctccggccagaacctcagtcaaaattgaaacctgcgtattggccttgagcgacagtttgtcgataagcgggaacagtttccaggcgggcgacaacgcctcactcacaattgtgatgtgtgtttcccaaccccgcgccagcgcttcagcatcggtagtcagtttatcggcagcttccaataacacccggccgcgatccagtagcatccgaccaacatttgtgaatttagtgcgatgcccggagcggtcaaatagcaccacatccagctcttcttcaagcttctgcatggtgtagctgagggccgaaggcactcgacccagttcatcagcggcagcggcaaagctgcctcgacgatcaatcgcatccattacccgcagcgcttctagcgttaacgcccgatctttggccatcagttttctcagtcaggaaatttgaatataccgaccagattaactggctaacaatcctgcgtccagacgcttaccatttgtctatcaatttataggggcaatcatcgtcatgatcacatgcagaacggcaaaacagtgcgggcaagctgactttggttggttacaggcccgctataccttttctttcggtcattatttcgatcccaaactgctgggctacgcttcattgcgagtgctcaatcaggaagttctcgcacccggcgcagcgtttcagccacgaacttatcctcaggtagatattctcaacctgatcttacagggtgaagcggagtacagagacagtttgggtaatcatgtacagggaaaagaaggcgatgttattttattttcgccgcagtctgaggtgagttacagcgagcataatttgagtggctgtaagccattaacccggattcagctgtggctgaatgcctgccctgagcaggatactgattcgagtcagcgtctagcgctaggcaatgaatcatatcgtttactggcttcgcctgatggcgatcaggggagtctgaagctgcgtcagcagatgtggattcaccatttggatatggcggcgggagatgaacatagcattcagcttcacggtcaacgggcgtatttacagtcaattcacggcaccgtagaagtggaaggttcgcagaccagcgatcttcagcgtctgacctgcggcgacggcgcctttgttcaggaagagcagcagctcaccattaaagccaaaacgccgctacgcgcgctgttaatcgacctgccggtataggtactgattcaaataacagctgaatcctcaaagatcgcatcacgctggattttaggacgtcgcgagctagccgagttggggtgcgcccagcacgtaggaaccggaacctacacaaagtaggtgaggattctgagcactgcgtcagcccaaaatggcgacgcgcagtagcctgtcaccttacaggctcgagcttagcgcaccgaggggcgctccggcggctcacgccgctacgaccccagcggcacgctttcactcgcatccgtattagtgttgctgacttatcacgtcaagaaccgaagaaattacactccattgaattttagggcgacgcgcagtagtcaatcacccaataaaaaaccccttgtgaggataacctcacaaggggctctataatagagggagttgaccggtaagccgggttctgtcgtggacagtcattcctctaggccagcaatcgctcactggctcaagcagcctacccgggttcagtacgggccgtaccatgtgaacccctatttggccttgctccgggtggagtttaccatgccacggactgttgccagccgcgcggtgcgctcttaccgcaccctttcacccttacctgatcccacttgcgcgggccatcggcggtttgctctctgttgcacttgtcgtaggcttgcgccccccaggcgttacctggcaccctgccctatggagcccggactttcctcccctccacctgtctcccccgagagggacggcagtgaagcggcgactgtctagtcaactccgcggcggattatagtcacattgaagcggaatgtcatctttcacttgaaacaaagatttatagtgattaattatcaaacaaagtgattttatcgaacgtggcttaactctgttttgcatatgcgataataaatgaagccgttacccgcgcaattgggtcaatgtatggcgcgatatgttctcttcctccgataccgcgtgaatgacctattttcactttattacagctcaacaaactcatagataattgtaaagatgctgacaaaaattaccttttcgatcaaaacaatacgcagaatttattagctagaattagaactgtcaggccaacatttcactcgagcgttctaggagctgtactatgaaaagtatcgcgctgttcattgctccacttgccgcaatttttttgctcagtagctgtgtggtggaacccgctcgctatcgcgaatctgaatttgtggtaccgccgggcatagtttatgtcgctcctgaatatccaatgccagggccgggctatgtttggcgctatcatgaaggccattcgtggggctggtatcaccctgggcatggctggcatcacggttggaaataatgggtaaagagcctgataaaagccggacatcgcgcccggctttgcacattactgcgctgcgtcttcttctgtctcttccgcatcgctctgctggttgagcgcatagcgatataaggcatttttcttcacgccgtggatttctgccgccagcgccgcagctttctttagtggaagctctttttgcagtaatgccagagtgcgcagtacctcagccggcaatgcatcgtcagccagcgctttgtgtccttcgacaatcagcaccatttcaccccggcggcgcatgtcatcttcctgcacccaagccagcaattcgcccactggcgcaccgtggattgactcccaggttttggtcaactctcgcgccaaaaccacgtagcgttgtgggccgagcaccgtcaccatgtcctgcaaactttccaagagacgatgggtcgattcatagaaaataagcgttcgtggttcctcaatcagcgcctgcaaggtatccttacggcctttggtttttgctggcaaaaagccttcgtagcaaaaacgatctgaagcaatccccgcagctgacaacgcagctatagcagcgcaagctccgggcaaaggtacgacccgaatacccgcttcacgacagcggcgcaccaaatggtagccgggatcgttgattaatggtgttcccgcatcggaaaccagagctatactttggccttcctgtagcttcgccagcagttggtcagctttttgttgttcgttatggtcatgaagcgcaaacaggcgcgcgttgatagcaaagtgttgcaacagcaaacccgtgtggcgcgtatcttctgccgcaatcaaatcaacgcttttcagtacctctaacgcccggtgggtgatgtcccctaagttaccgatgggggtgggtaccacgtaaagcgtagatgcagaaatcactgctcgatcgtgttgattcattgtttcatccggattaccgatttaatattgagcatcttgaaaaaaacatcactggatacagtatgctttcctcaacatccgttcgtaccaaagcaggaattttcattcctgctgttctggccgctcttgtcttggctggctgttctggcctggccccacagactccgccgccgtcaaatatacaggacgaagcaagcgcgaactctgattattacctgcaacaattgcagcaaagtagtgatgataacaaggctgactggcaattactcgccattcgtgccctgctacgtgaagggaagctgccgcaagccagtgagcaactgaatacattgcctgaaaaaatgagcgacactcagcgtcaggaacaacagttgctggccgccgagttattggttgcacagaaaaatgcacctgccgccgctgcaatactggctaaattagacgccagcacattatcggcaaatcagcaggttcgctattatcaggcgctgatcggcgccagtcagggtaaaccgactctgccgctgattcgcgcctatatcgctcaggaaccactgcttaaagataaggctcatcaggataacatcgatgccacttggctggcgctggcgcaactgacgcctcaggatttgaatacgctggtgatcaatgccaatgaaaatgtcctgcaaggctggctggatctgttgcacgtatatcaggataaccgacagaaccctgatttattgaaagcggcgatcaaagactggcaaactcgctatccgcaaaatccggcggcgaaatcattgcctgcgcagctaactcagattgtgaacttcactcaggcgtccaccgctaaaattgcgctgctgctgccattaagcggtcaggcaaaagtatttggcgaagctattcagcaaggttttatggcggctcaaagcggcctgccagcacctgcaccaaccgcagaaccgaccattgacgcaagcgcgccagtggacggtgaggccgccgcaacgccggaagccccggctccagttgccgcacctgtcgctgccagcaatgcacaggttaaagtctatgacaccacttctcagccaatcgctgcgctgctagctcaggcacagcaagatggtgccacgctggttgtcggcccgttgctgaaaccagacgttgagcaattaaccgccacgccgaccacgctgaatattctggcgctaaatcagccagaaaccgccaaagacagcccaaatatctgttacttcgctctgtcgccggaagatgaagcgcgcgatgccgcccatcatttatggcaacagcaaaagcaaatgccgctgttgctaacccctcgcggtgcttttggcgatcgtatcgccaaagcctttgctgaagaatggcagaagcaaggcggccagaccgtactacagcagagctttggttccaccgcagagttgaagcagtccatcaacagcggcgcgggtattcgtctgaccggccaaccaatttctgttacaccgacagcggctccgcaatcagtgactatcgccggtttgactatcccggcaccgccggttgacgcgccggtggtttctacttccgcaggcgggaacgtggatgccgtgtatatcgtggcaacgccggacgagctgacgctgattaaacctatgatcgatatggcgaccaccactcgcagcaaaccatcgctgtacgccagctcgcgcagttatcaggctggtgcaggcccggattaccgtctggaaatggaaggcgttcagttcagcgatattccgctgatggccggcgccaaccctgcgttgatgcagcaggcttcctccaagtttgctaacgactattcgctggttcgtttgtatgccatggggatggatgcttggacattgtctaaccactttgctgaaatgcgccagattccaggctttaaggtatcaggctctaccggtgaactgaccgcatcatcaaactgcgtggttaaccgtaaactgccttggttgctataccgccagggaatggttgttccggcgcaataaccggcgttttcaacctgactttagcgcccccgtttccggtcgggggcgaaaataatggattaaaacatgagccaaagggatattggcgcaaattatgaacggctggctcgccgccatctggaacaagccggtctggtctttcattctgccaatgtgagcgttcgcggcggcgagatagatcttattatgcgcgacggtgcgacttgggtatttgtcgaggtgcgttttcgtcggaatgcgacctttggcggtgccgctgccagcgtgactcataccaaacagcaaaggttattacgtgctgcagcggtttggctggcgcagcgcggagccagttttgacacatcatcttgccgttttgatgtttttgcgattaccggtaaccagttagaatggttgcctaatgctttcaatacggattgatcatttttctccggccaaagccgggcaattcattttactgagtgggttaaatcaacgtgctggatagaatcaaagtctgttttaccgagagtattcaaacccagattgctgcggcggaagccttacctgacgcgatatcacgagcggcgatgatgctggttcaatcactactgaatggtaacaagattctttgctgcggcaatggaacctcggcggcaaacgcccagcatttcgccgccagtatgatcaaccgattcgaaaccgaacggccaagcctgccagctatcgcactaaatgccgataatgtggtgttgaccgcgattgccaatgaccgtttgcatgaagaggtttacgccaagcaagtgcgtgctttaggccaggccggagacgttctgctggcaatttccactcgtggtaacagccgtgatattgtgaaagcagttgaagcagccgtaacccgcgatatgacgattgtcgcgcttacgggttacgacggtggtgaactggcaggtctgttaggccagcaggatgttgaaattcgcattccttctcaccgcagcgctcgggtgcaggaaatgcacatgcttacagtgaattgtttgtgtgatctgattgataacaccctattccctcatcaggacgattaaaggagcataaatgaaggttagtttcccattttttgccgtgctgtttagcgcattgctattacaaggctgtgttggtgccgtcgtagttggcagcgccgccgtggcgaccaaatccgcaactgaccctcgcagcgtcggtactcaagttgacgacggcacactagaagcccgagtgaccaacgcattgagcaaagaccagcaactgaaaaaagaagcccgcgtcgtcgctacggcttaccaaggcaaagtactgctaaccgggcaagcaccgacgaccgaactggcaacccgagccaagcaaatagccgctggcgttgaaggcaccagtgaagtgtacaacgagattcgtctgggcaaaccggtcgatctgggcaccgcttcatcagatacctggattaccactaaggttcgttcgcaaatactcaccagtgattcggttaaatcttctaacgtcaaagtcaccaccgaaaatggcgaagtgttcctactcggcctggttacgcagcaagaaggacaatctgccgcgcagatcgccagtaaagttggcggcgtaaaacacgtcaccaccgcctttacctacgttcagtaatttactcacttaaaagcaaaagggcttagttgatactaagccctttttgtttctgccaactcaacctagcggccgttttacagcgcattttcctgtaggaaagttttgccgcccagctgacgcatttggcgtaagatccactgttggcggctaattacatagcctgagggtgcatttgccttaaagcgatgtggattcggcaacactgccgccagcatagccgcttcagaagcgcttaaccggctagcaggcttatggaagaaacgctgcgccgcggcctcaacgccgaaaataccgtcgccaaactccacaatattcagataaaccgtcaaagtgcgccttttggtccacaccagctcaatcccggccgtcaatccagcttccaaccctttacgcacccaactgcggccatcccacagaaacaggtttttcgccgtttgctgcgataacgtcgatgcgcctcggatgcgtttttgattgcgctgattgtgcgccagagccgattcaatggcccccatgtcaaatccccaatggtcagggaatttctgatcttccgccgccatcacggccaaagccatgtaaggggaaatttcgctcataggcacccagtccgaatgcgccacgtaagaaaaatcgccggaaaaccaagctccgagctgcctttcgaccatcaccatggagaagggcacgggcaggaaggcaaaaatcaaaatagcggccagccaaaagcccaacagcgccaaaatgccacgctttagaccacgccagatccatcctatcccgtatttccccaatttcattcgattaagcccagcaccttactcaccagtttgttgataccgacggctgcttctgagatagaaccggccagcatataggcgggcgtggtaacgactttatgctccgcatccaccacgacatcttccaccgggcaaacgatatgttctccccccatggcctcaatagcatcggcggtatcgatatcattaccaatagtcaggcgaattcgctctcccaacagctttggtaacaaagctggggcaatacacataaatccaattggtttgccagacttatgcattgtttgagtaagcttatataaatcttcgtctacagaacacgccgttccttcggttgcgaagcgactcagattcttcgccgcaccgaatccgccgggtacaattaacgcgtctaactgcgccggatcggcggcagaaagtggctgaatcttacctctcgcaatacgcgcagactcgactaacacgttacgattttcgtcggtaatttcaccagataaatgattaataacatggagttgcgtcttgtccggcgcaaagcatactgcctcggctccggcgcgatccaaagccagcaatgttaagacggactcatgtatctctgcgccatcgaaaacaccgcaaccactcaacactacaccgactcttttcatcacaatcctccttttgtttcgctgtcaatcgctaacctgttctagtgacaaacaacaatctctatcacatattttaatgaatcttgtaacaagagcgcttacatttgctatgttgttgcttgtatgatgtatcaacgaatccataaaacctgcggacacacacagaaatcaatacgcaggttcacgttttccctggtgttggcgcagtattcgcgcaccccggcctcggtcggggttattttttttcagcttccgcagtccactcacgcagtacctgaacatcgttacgccattccagtttcagctcatcaatccaatcctgaacgttatcccaccatgctggcaatgaaggcgtttgaatctgctgtgccagttgctgcaaatgccgtaaacctaccgaacctgccgcccctttaattttatgcgcttcttcggcaatacctttttggtcacgagcggtcatattggaatccaacaccgccagataacccggcatcatctgctcgaacatttccaaactctgatgaatcagctgtggtcccaccaaatcgatgtattgctccaacatcacggtatcgagtaacgattcattagtttgcatcggtttatgttcctgtttttttgtggagtgggaaggctgatgatcccagagctgcttgatcattgccgttaaagccgggacagacagcggcttgctcagcacgtcatccattccagcatcaagatattcttttttatcttttagaacgttagccgtaagcgccaccagcggcggcaagtggcaatggccataatccgcgcgaattttgcgagcaatatccagccctgtcatatccgggagctgaatatccaataacactaaatcaaagtcatccggattaaacatatccaacgcatcctggccattcatcgccacctcaacgctgttacccaatttttccaacaccgagcgcgccacaatcacgttgagttcgatatcctccaccagcagcacgtgcagtgctggcagcggcatatcttcatcagacaacacgctagccgcctcatcctgcaccgcaggcgccttgatagacagcgtaaagcaggaaccgatgccctgagtgcttttcacggtgatatcgccgcccatgctctgcgccagccgtttggacaccgccagcccgattccggttccggtagccggacgcccgccgttgctgtctttcacctgataatacatagcgaagattttgtcttgttcatcctgcggaattcccatgccggaatcttccacttcgaagatcagtcggtcaggattttctcgtcggatacgcacaactatctgcccttcctgagtgaatttcaccgcattaccaatcagattccacaaaatctggcgtaggcgagtgccgtcggtgatgattttctctggtaatgaaccctgaggttccatcaggaatttcagacctttaggctgaaccagcaaaccggacaggttttccagatcggtcataaaaccggtaaagtcgatcggttggttgtccaactgcactttgcgccgttccaacttatccatttcgataatatcgttgaatatattgcccagagtgatggcactaacatgaatggttttgaggtatttcagctgttcatcgtttaaatcggtatccagcaagatacgacttaggccgacgatgccattaagcggcgtacgcagctcatggctgattgttgagatgaaagtggtcttatccctgctggcgttctccagcgcgtcttggtagcgcttacgctcggttatatcgcggccaaagcccatcagaccatgccgtttacccacgcgatcgtaaaacggtactttacgcagttcaaaacaggccttacgcccatcggggtacaccagccactgttcgtaggtcagagaaacgttgtggcggaagactttttcatcggtttccattactttttcggcaatatctggcgcgtaaacttcctgtggcgtcaagccgaccagctgtttctcacttttaccggtcagcaactccatcgcgcggttacagccggaaaattcattatcttcgttacggtagtagaccaaatcgggggatgcatcgaggaaggaacgtaatagggcggattgttgccctaattccacctgcgcctgctcacggtgccccatttcctctttcagtttatccacaacctgtagatgggctttctccgctttctcgcgttcgataatttccagatttagctgcgagatattttcctgcaattgctgattcagttcccgatcgcgataacgcatgatttccagcttatctaccagtctggatagtcgctgacgggattcctccagctgttccaccaccactgacaggaagtaaaccgcccacggcgtgattaacaggccgaaaaagatggagcgaacaaaatcgatgctttcgaccgagccgcgtaataccaaagtgacggccatttgcaccaccatcgccagtattaccagcaccgaagccagcagcagcgagaagcgcaccagccctaacttcaccattaaatcaacgtaatactgggctaataccctgatttgcttcataaccactcccgtcaaacttcatgcgataaatcataccgcaaaaccagaaatagataaggcgggttgccaagaagtgtggaaaagactgcaaatcaacgggaaattgcgaaagttgagaatggcgatagcccgcagacacgccaaaaataatgggcgatgcgctgtagccaagttggggtgtgcacagcacgcaagaagcggagcctgcacaaaccaggtgcggattttgatcactgcgtcagcccaaaatggcgacgccctaagcctatctcccaaggcttagggcgttcgagcgacagtcaaactgagtacgcctgcgcgcagtgccccggatttacacccagtagcacgcgaggaggtagcagtacgcgaggaggccgagcacaacccaagttcaggtgacaaacgccttgtagccgatcacctacaaagcggaggcttggcctccgtgggctaacatataccgattcaactccaccataccggtccagcgattttcgcaccacagcggagccaacagggttgggcgacgagcactggcggaaattcggtgatagacaatatcggcgggtgtatgacgaatcatttctccggcggtaaccacatagtcttccagagccagttccggcaaacgccctgctcgccaggctttagccatagtgctgccttccacgatatgaagcggatgcagttttagtccatccacgccggtatccacaacttgttgcagagtttgcaggcattgcgcttgattttcgccgggcaagccaacgatcaaatggcaacacactttcagaccgcgcgcgctggcacggcgagccgtttgttggtagctggcgaaatcatggcctcggttaatacgtttgagggttttatcattggcagtttgtagccccagctccagccagacttcgtaaccttgccgatgataaccactcagcaggtctaataccgcatccggtacgcagtctggccgggttcccacacaaacgccaacgatatccgcttcggctaaagcctgttggtacatggctgccaacgcattaacttcggcataagtgctggtataagcctgaaaataagccagatagcgattagctcggttaactttcttcgcctgcgcttccagttgctcgctaatggttcgtagctgcatttgttcgtcagcaaacgaagccacctggcaaaatgtgcaaccaccacgccccagagtaccgtccctattcgggcagctaaaaccgccgtggagcgtgagtttatggattttttcaccatagcggcgctgtaaatccgcaccaaacatattgactaattgctgcaactgcataatctggaggatgcctgtcgtaaaagtcgcttagcctaactggtcagggtgttccgtgcgatgacagagatcaactcccactccctcgggtgcaacttcgcataaccattcactataaatgcaaataaaatcatttagctaccgattaatttttctaatctcggcaaacaccttaccgcatctattacaaattgatgaaaaatagttttaaatgtcacaaaatcattaaatcacagaatatcactctgacatccccaccagcactagcatggtgcagagatttgacgattgcactatagtgagacagctcacacttctactgcccatcaacgactctttcaccgggtcaaaaatgcataaattatttttaatatcatatagataaatcattttttgtgatctggatatatcttaggcctatatttgacctcggtattctttctcgctaagttggaagtccgctggaagctttctagacgggcaaacgtctagtcataattatgcagttatttaagactccctcttaaaacaagtcatataccacttgtgagaccatcacgagaggtcattgacggagggcggaaaagcagatttgccgcgccaggcgcgcctgtcagcccacccgtcaccgtgaattgtccctcgcagtcggttgtgagagtcacgcagagcctggggaggttcactgatatgttgtacgataaatcccaagagaaggacaattgcggttttggtctcatcgcccacatagaaggcgaaccaagccacaaggtcgtgcgtactgcaatacacgcgctggcccgtatgcaacaccgtggtgctattctcgctgatggtaaaactggcgatggctgcggtttactcttacaaaaaccggatcgttttttccgcatggtcgccgaagagcgcggctggcgtttggcaaaaaattacgccgttggcatgatattccttagccaaaacgatgaactggctaacgcaagccgccgcatcgttgaagaagagctacaaaacgaaaccctttccgtggtgggctggcgcgaagtgccgaccaaccctgatgttcttggtgaaatcgccctttcctctctgccgcgtatcgaacagatttttgttaacgctccggccggatggcgcccgcgcgatatggagcgccgcctgtttgtcgcgcgtcgccgtatcgaaaaacgcatctcagatttagatttctacgtttgtagcttctccaatctggtgacgatctataaaggcctgtgtatgcctgcggatctgccacgtttttatctggatctggcagatttacgcctcgaatcggccatttgcctgttccatcagcgtttttccactaataccgtgccgcgctggccgctggctcagccgttccgctatctggcgcacaacggtgaaatcaatactattgccggtaaccgtcagtgggcgcgcgctcgtgcctataaatttaaaacaccgctgattcccgatttgcaggacgcagcgcctttcgtcaacgaaaccggttcagactccagctcgctggataatatgctggaattgttcctcagcggcgggatggatctgatccgcgctatgcgtttgctggtaccaccggcttggcagaataacccggatatggataccgacctgcgtgccttcttcgactttaactccatgcatatggagccgtgggatggcccagcgggtatcgtgatgtctgacgggcgctacgccgcctgtaacctcgaccgtaacggtctacgtccggcgcgctacgtgattaccaaagacaagctgattacctgcgcttccgaagtagggatctgggattaccagcccgatgaagtggtagagaaaggccgcgttggccccggcgaactgatggtgatcgacactcgcagcggcaagatcctgcattcagccgaaaccgataacgatctgaaaagccgccatccgtacaaagaatggatggaaaaaaacgttaagcgcctggtgccatttgaggacctgccggaagatcaggtcggaagccgcgagctggatgatactcagctcgaaacctatcaaaagcaattcggttataccaacgaagaactggatcaaatcatccgcgtattgggtgaaaacggtcaggaagcgacaggctcaatgggcgatgacaccccatttgccgtgctttccagcggcccgcgcattatttatgactatttccgccagcagtttgcgcaggttaccaacccgcctatcgatccgctgcgagaagctcacgtgatgtcactggcgaccagtatcggccgtgaaatgaacgtattctgcgaggccgaaggtcaggcgcaccgtttgagctttaaatccccgattttgctgtattcggatttccagcagctcactacgctggaaggcgagtattatcgcgccgatcggctggatctgacgtttgatccgagccagcaagatctgcaacagcgcgttttatcactgtgcgacgaagccgagcgtaaagttcgcgatggtgccgtaatgctggtgctctccgaccgctcgatttcccaaacccgtctaccggtgcccgcaccaatggccgtgggtgcgattcagactcgattagtagaaaaaaacctgcgctgcgatgccaacatcattgttgaaaccgccagcgcccgcgatccgcatcacttcgccgtattactcggctttggtgctaccgctatctatccttatttagcttatgaatcattggctaaattggtcgacacacaggctatagataaaaagtaccgcgatgtgatgctcaactatcgcaacggtatcaacaaaggcttgtataagatcatgtccaaaatgggcatctcgacgattgcgtcttatcgctgcgccaagttgtttgaagccgtaggcctgcacaaagagctgtctgaactgtgtttccagggtgtggttagccgtatcggaggcgctaacttcagcgatttccagcaagatctgcaaaatctctccaaacgagcctggctcaagcgtaagccgttggatcaaggcggtttactcaaatttgtccataatggcgaataccacgcgtataacccggatgtggtcaatacgttgcagaaagccgttcacagcggtgaatacagcgattacgaagcttactcaaaactggttaacgaacgtccagtggctacgctgcgcgatctcttggcaatcaagccgcaaggtacgccgatcccagtagatcaagtggaaccagcagaatctctctttacccgtttcgatacggcggcaatgtctatcggcgcgctcagtccggaagcccacgaatcattggctatcgctatgaatagtttgggtggattctccaactccggtgaaggtggcgaagatccggtgcgctatggcaccaacaaagtctcgcgaatcaaacaggtagcatctggtcgttttggtgtcactccggcctatctggttaacgccgatgttattcagatcaaagtagcccaaggggcaaaaccgggcgaaggcggccagttaccgggtgataaagttacgccctacatcgctaaactgcgctattccgtacccggtgtgacgctcatttcgccaccgccgcaccacgatatttactccatcgaagatttagcacagctgattttcgatttgaaacaggtcaatccgaaggcaatgatttcggtgaaactggtttccgagccgggagtcggcactatcgccaccggcgtggccaaagcctatgccgatttaattaccatcgccggttacgacggcggcactggtgccagcccgctttcatcagttaagtacgccggttgcccgtgggaactgggtctggtggaaacgcaacaggcactggttgctaacggtctgcgtcataaaatccgtttacaggtggacggcggcctgaagaccggcgttgatattgtcaaagccgcgattctgggtgcagaaagcttcggtttcggcacggggcctatggtggctttaggctgtaaatacctacgtatttgtcatctgaataactgcgccaccggtgtagcaactcaggacgaaaaactgcgtcgcgatcactaccacggcctgccggagcgcgtagtcaattacttccagtttatcgccagagaaactcgccagatcatggccgaactgggcgtaagccaactggttgatttgattggtcgtaccgatatgttgatcgagttggatggcatttccgccaagcagaacaagctggacttgtcatccttgctggccacagccaaaccgcatccaggcaaagcgctgtactgtaccgaaaacaatcccccgttcgataaaggctcactgaacaaagcgttgctggaacaggctgaaccgcatattgaagccaaacaaagcaaaactttctactttgatattcgcaacaccgatcgctcggttggtgccgcactgtcaggggcgatcgccgcgaagcatggagatcaagggctggcgaccgatccgatcaaagcgcatttctccggtaccgccgggcagagctttggcgtatggaatgccggcggcgttgaattaacgctaaccggtgatgccaacgactacgtcggcaaaggcatggccggcggtcgcattgcggttcgtcctccggtaggctcggctttccgtagccatgaagccagcattgtcggtaatacctgtctgtatggcgcaaccggcggtaagctcttcgccgcaggtcgcgctggtgaacgtttcgccgtgcgcaactccggcgctatcaccgtagttgaaggtatcggcgataacggctgtgaatatatgaccggcggcatcgtctgcgtgctcggtcgcaccggtatcaacttcggtgccggtatgaccggtggattcgcctatgtattggacgaagacggcgagttccgtaaacgcgttaaccctgagttggtagaagtattggatgtcgatgaactggctatccatgaggaacatctgcgcgggctaatcactgaacacgttcagttgaccgggtccagccgtggcgaggaaatcctggctaactggccggattgggttagtaaattcgccttggtgaaaccaaaatccagcgatgtgaaagcactgctgggccaccgtagccgttccgcagctgagctgcgggttcaagcgcagtaaggggttaaaatgagtcagaatgtttatcaatttatcgacttacagcgcgttgatccgccgaaaaaaccgctgaagatccgtaaaatagaatttgtagagatttacgaaccgttctcggaaacccaggcaaaagcacaggcagaccgctgcttatcctgcggtaatccttactgtgaatggaaatgtccggtacataactacatcccaaattggctgaaactggccaacgaaggacgcattatggaagccgcggatttggcacatcagaccaatagtctcccggaagtctgcgggcgggtttgtccgcaagatcgtctatgcgaaggttcctgtacgctaaacgacgagttcggtgcggtgaccatcggtaatatcgaacgttatatcagcgataaagccatagaaatgggctggaagccggatatgtcacacgtccatccaaccggtaagcgcgtggctatcatcggcgcaggtcctgccgggctagcctgtgctgatgtgttgacccgcaacggcgtacaagcggtagttttcgatcgtcatcctgaaatcggcggtctgctgacctttggtattccagccttcaagctggaaaaagaagtgatgatcaaacggcgcaagatcttctccgaaatgggcattgagtttcgactgaataccgaaatcggcaaagacgtggcgatggaaactctgcttaacgattacgatgcggtattcctcggcgtgggaacttatcagtcgatgcgcggcggattagaaaacgaaggggcagccggcgtctacgatgcgctgccgttcctgattgccaataccaagcaactcatgggttacgcggcaacctcggacgaaccttacgtgaatatggaaggtaaacgcgtggtggttctgggcggaggagataccgcaatggactgcgtgcgcacctcaatccgtcagggcgcaacgcacgttacctgcgcctatcgccgtgatgaagtgaacatgccgggttccaaacgagaagtaaaaaatgctcgtgaggaaggcgtcgaattcaaattcaatctgcaaccgctcagtattgaagtaaacgatgcgggtaaagtttgcggcgtgaaaatggttcgcacccaattgggtgcaccggatgcgcaaggccgccgtcaggctgaacatattgccggttctgagcacattttggatgccgatgcggtggtgactgccttcggtttccgtccacataatatggaatggttagccgctcacgctgtcaatctggataaacaggggcgtgtagtcgcgccagaaagcgccgataacgccttccagaccagcaacccaaaaatctttgccggcggcgatattgtccgaggctcagacttggtggtcaccgctattgccgaaggccgtaaagcagccgaagggattatggggtatctggaagtctgaatttgccagtaggtaggcagaaatacactaaaagggctgatattcagccctttgttatttcactctcatataaatggcgagccatcatttgtgggtaaccatatatcaaattgaagtcttcaatcagctcaccgaatcaggtaactaatccttgggaaaaatgattttaccctgatcgtctgaagggctgactttctcagagatatgtagaatttcggtccttttacccggaatcggtaataaactaagtgaaccattgaaaatacctgagaaataggccttaccaccaatcatacgctcaccgatattcactctatcttctgctaataactctatttcacgattatctgaaccttgaatacgctcaaatgtcatttcttttgccttaacaatcgcatgttctgcaaaattgagctcacctaatgttatgttttcttttgctgtcatcttaatatttgtagcattcaccgaggcatcactcctggttttggtaatactttttccagcactcataatgaccttctgtctagcacttaggccgttggtagagatatcgccagacatactagccagataaacattgcctccagaaatagaaccttctgtgactaaattatcgactggtgctaaatttattgttccgttggcctcaagagcagtggcatttaacttaccaaaagtcttcatggtaatatcttgctcagctctaatatctttaacaagcagtggatttctggaaccactacgatatttaaccgagttgatgccgctgtcagcgtttgctacaaaaccgctagatgcagaatttacaacaccttttaaggtatcggttttattgaaatggttctctaaataataatcacctcctttcgtcatttcattacctacagtgatagttttcgctataatttctgcccctgcgttactgctttgtactacgctaccctcgctatttaatacaacatcttttgcattgatcatgcttttaatattagttgaaatacccgaattaagatcaatagtcccattagggctattcaaacttcccgccaaatgctcaacactctcgccaatcaatttaattcgaccattattactttctacgacaccagcattaatcacatttctatttaccacggaataccgcgcatatggcgcttccggtattaatctaatatttgagaatgcgtgccttttatcttgattattccaagatgttgtatcaacttttaccgacatgccactatctccaactgatagtgtcatgtcatcgccagcagccaataacacttcatttcctgaatcaataacgccttcattaccaacagcagctcccatcatcacaacattatctttcgctgtgatttttcccaggttaacaaccaagccaccacgagcgtccccagaaaatgcgatatttccaccaggtgtagccataaaattatcattagtggaattcaagctagacagaaccaagctacctacatcaattttggcaccgtcggtaatggtaacgccgcgcggattaacgacgaaaacctgtccgttagacaataaattaccttgaatgtaagtttcaaattgttcgtgaacccgatttaaaacagcggaattagtattaggttgttcaaacttaacggtttcacctggtgctataccgaagttagtccaatcaattaccgctctgtcactattctgcgtaataatagtagtattctcagggcttttttcaccaataattgcattacccgcagtgacttccccaacgcctaatgcataaacttggccacttaatataaagctaatacaaacggctagaggtttggctattctattacttttcatgataactcctttatatgcagcaatatctatccctgattagagatagccccgcgaaataatcgcgtaagatgtttatataaaaataaatgtcaactcagatgataattaaaaataaataacacaaccaatttattcataaaaatatgatttaagtgaaaacatggttattatgaaattattattagaaattaatcgaaccggttaaccaccatcggccacgatcggtagcgccaagtaaattatctactgcgccagcccgtctggcataagtaatatcaatgtttcctcgatcgtgctgataagtcagccctgctccataaccttgtaataaaacatgattagattgaccgattcctttatttgccagtaaagagccttgggcgtaatcatagaaagcatgagtactgattccaggatataacgtagttagatccaggcgtaatgctggggatagggaaaaacctcggtctacgctaatcgtattcacatcataagcccggacaatcgatggaccacctagcgccattttttccacgccgtccatattctgatgactaaattgcccggaggcacgcagactagcgccaaaataatcgttgagtcgctgtaatcccataccctgggcttcccacttccaaaattccccacggttaggattatcttgctgcgcatcccttaactttccacgagttaatcctgcacgatagttaaaaatattaggttgtccaaaccatcggtgacgaaagtccccattgagactcaaacttatagagtcttgctcacggtgagaaatgaaggtcaatattttatccctcatccacttataatccccctgtacacccagagataaattattgcccgcagtacggataaccggccaagagctataaatcgagagcacatcagcattactgtcgataaaaccggtaaatcttccccccggctgcgactcaacccgactataagaaataccgccccgtgcgccttgataacctaagggtaaatcataggcaatattgcccaggatagttttggcatcattggaatctttattttgcaggaactgaggaacatagagcaccattccctgtaagcgatccgccgatcctgttgggttattaatggtcattcgagcaaaagtccggatgcggccggaataacgccccccatgattatccatcatcaaacgtccgctaatcactggctctgatgccacgctcacgctcagctgcgagctccctacctgttcacccggtgataatattgaagttaatggcccgattcctggctgatcccctaagcgcagcagcgcgctttccatttgactaatatcttcaggttgcttattccctgcctgtaggaatttatttatcaaactatcgcgcacgttagattgattgttgtgtagatgaattttctctaactgcccttgcaccacctgaatataaacatgaccttcagtaatatcttgttctggcaaataagcaaaactaagaaggtcgccacttttgcgcattatcctttctatttccaatggaatagcctgtagctgggataagctcatattctgattctgtcgcgcggctaatagcgtatttacttgttcccgatagcgctccggtaaagatttcacacctagcgttgccactcgcagcatttgccccgtgtcgcttttcgaattggatttttcgcgttggtcaatgactggtttctgctgcaccctcgttgtttcttgggacaatagttgttcattatcttgtaaaatagccgcgctacctgtaacgactcctgataaagacggggtatttgcccaacttttctgattcaaacctaataacacgaaataaaataaaaagtaatgaatagagtgagtaataaatctattattttcgcgcatgggagaatatccagtcatattataagttccttttaaatgcgcattatcactccttgcattccaattaatgacattgatagatattaatcatataaatatccatactagatcatcaaagttaacaatggatgctttgcgttttaatatttaaataaataatatcatttcaacgtagccacatcattaactcactacttaatgacaatttcaattaattaaccgcagcaagctttaattaagaatattctgcactaaaatatttactatataaatataagcaatgaaacacaatgtaatacatataaataaaatttgtatcatgaaattaaacatgggtttttgttatgtatttaaaaataattaccagcatgattcggatgggaaataaaaattaataatattatcaaatgaatagggtagaaaaataaaaaaattgtaacaatcaagtcaactatattcatcgcgatctatacataaatagctataatgactgacttatcttcgtgtaagcgcagatattggcacaggttagctattgaacaaataaattattttaatttgttatagttacaacccgttattttgatcaaggatatcgatgatgaaaacccctttgctattactcgccggtggtttactggtcaccagtttcagttctctggctatgtcactgaattatcaggaagtaggctacaacattgaagcacgaggagccaaagcggtagtagcagaactggctaaatccgggcaactgtcggcggtagaaaataatatcaagctgggtgatgataactggattgcgatggcgccgaagctagtagaaggtgggaatcagaaatttgcgcaaggcgttaaatcagcactgtcttcagccctgatttataatccagcggcggtcttgaaggccgtaggcgatagccattcgttaactttgtccgacgtctgtactgctccgactgatgcaacagatagcaccgccaaaatcaacttcaaacaacgggcttccagaactctatcgactatcagaaatagcgatatgatgaccacgcgggatagttgcatcgccgaattgcagaagctgtcttaacgatcggcttttgagccagaaacaacaagggcggcctaagccgccctataataatacgcagaacactcggattattatttcacaacccgtaatgcaggccgtccaccccgtggaggctgcggaggctcatcatccggtttgctgctgtccagctttgcctgagtctcatcggtgaccagcaccaggctttcgctcggcgcgttttcttcgttctggtcatccatctcggcaaaataaccttctgcgtcggcatcataagccgcttcaggttcaaacatcgtacccgcgccgttttctctggcataaatagccagaactgcgcccataggtacaacaacctgacgaggtacaccgccaaaacgggcattgaaacggacatcttcattacccagttccagattacccaccgcccgcggcgcgacattcaatacaatttgaccatcacgggcaaattccattggaacctctacgtcgggcagcgtcacatctaccactagatgcggtgtaagctcgttatcaatcagccaatcataaaatgcgcgcagcaggtaaggacggcgcggagacatatctgacatctccataaccattaaccttgaatgcgcaaacgcatttcgcgctcaggttcagtcagcgaggccaggaatgcatcacgttcgaacacgcgagtcatgtagcctttcaattcttttgaaccagcgccgctcagctcaatacccagttcaggtaaacgccacagcagcggtgccaggtaacagtcaaccaagctaaattcttcgctcatgaaataaggcgtctgaccaaagattggagcaatggccaacagctcttcgcgcagctggcgacgggctgattctgcttcctgaccggttttttgctcgattttgtacatcagtgaataccagtttttctcgatacgcagcatcatcaaacggctttcaccacgggcaaccggatacacaggcattaatggaggatgcgggaagcgctcatcaaggtattccatgatgatacgggattcatacagagtcagctcgcgatcgaccagcgtaggtaccgtttggtacgggttgaggtcaatcaggtcctgcggcaggttatccatctcaacctgctcaatctcaacgctgacacctttctccgccagtacgatacgtacttgatggctaaaaatgtcggtcgggccagagaacagcgtcattaccgaacgtttgttggcagcgacagccatgaaaacctccaagtttatctagaaaacagtgcgaatagccaacacaacggttgctatcctgagtagttttaccgccagttcactgtctcgaccaatacgccgttaataagccttggtcgagataatcattcagccagggagataaacggacgtcagcagctcggcgaacaggcacaaaagtgtgtgatagtttaccagattttgcttgttttgtggggatggtgcagtgatttcatggtgatttgtctgacgactcgcagtttagaccgcataatcgcagcccccaatagggattactcgaattttaggcataaaaaaacccggtgaggcaccgggtttttagcattaatatgatgccgtaaaggcaaaaaattaacgtttggagaactgtggacgacgacgtgctttacgcagacccactttcttacgctcaacttcacgcgcatcacgcgttacgaagccagctttacgcagttcaccacgcagagactcgtcatactccatcagtgcacgggtgataccgtgacggatagcgccagcctgaccagaaataccaccacctttaacagtgatgtacaggtcaaacttaccaaccatatctaacagtaccagaggctgcataacgaccatgcggccagtctcgcgaccgaagtactgttcgatgctacgttggttaataacgatgttaccgctacccggcttaataaagacgcgtgcggaagaacttttgcggcgaccagtgccgtagtattgattttcagccattgccataatcccgattaaatgtccagaacttgcggttgctgtgccgcatgggtgtgctcagtgcccgcgtaaactttcagtttacggaacattgcacgacccagcgggcccttcggcagcatgcctttaaccgcgatttcaatcacacgctcaggacggcgggcaatcatctcttcaaaggtcgcttgtttgataccaccgatgtgaccggtgtgatggtaataaatcttgtctgtacgcttgttgccggttacagcaactttatctgcgttcagaacgatgatgtaatcaccagtatcaacgtgcggggtgtattccgctttatgcttgccgcgcaggcgacgagccagttcagtagcgaggcgacctaaggtcttaccgttcgcgtcaacaacataccagtcgcgttttacggtttctggtttagctgtgaaagttttcattaaaagcttacccaattataagttacacgttggtgaacacccaaacgctcaaatcaacagttgaggctcacacgaccatcaagtccagcaaacctaccccttcgaatagcctatgctggcactataaagtttttgggaaaaaaactttattgtaacgtggggtcgcaagattatagagaagtcggttgcaaagatcgaactgtttttggcgtgagaagcataaaattacaggtgttcaatcgggcgatcaacgatcgccctggcgcagaatagcatgtttaaccagcaatgtgcgagcaacgacgtcaatatactgcaacctgacgttttacggcagatgaggcagtttaaggtactcttcgctctgcatctcttgtaggcgcgataaacagcgttgatactcgaattttaagcgctccccctgataaatttcaaacatcgatgcttctgcagagataattaacttcactcgacgttcgtaaaactcatcaaccaacgctaaaaaccggcgtgcggcattttcttcctttgccgtcatcaggcgcaaattgtgaagtaataccgtgtgatactcgcgggacagcgctatgtaatccaactgactgcgagcttcttcacataatgtatggaaatctaccgccagcacgccatcagcagcgctaatagctgccagcgggcgatgattaatctccaaaaccggcttttcttcccccactttccccgccagtttaataaacatctgacgcatattttgttcggtttgcgggtttaacggcgtgagatacaagtgtgcctgcgtgagtgtccgtaaccgataatcaataccggcatcgacgttcatcacttcgcaatattctttaatcagggcaatagcgggaatgaagcgcgctcgctgtaaaccgttttgatagagattgtccggcggtatgttagaggtggcaatcaacgtgataccgcgagcaaacagagcctgcagcagcgtagccagcagcatggcgtcggtgatatccgaaacaaagaattcatcaaagcacaacacatcggtttgagctttaaatccgtcggcaattatttccagcggattttcatggccttgcagttcggccaattcctgatgaacccgcagcataaagcgatgaaaatgcagccgaagcttacgatcgccgggcaaactgtggaaaaacagatccattagccaggtttttccgcgcccaacgccgccccacatatataacccctgtactgggggagtgaccgctaaagcgtggtttcttcctaataaacgactcaggcgaccacgcagacccagcgtgggtgtcggccgatttgcccgctcacacaaagccaaataaatctgttccagttgctcaaccgcttgacgctgaacctcgtcgggctgatattctccagcggctaaagcctgctgataacgtgctgtaggtgtactaggttgcatgtttttcaacaatccctgataaaatatttatctgtttttcgctgcgcttttatgctgatttatctggtaatcgacgcatttaacgacggtaatgccatcggaaaaagtatgataaccataggcaaagttgcatcaggattccactctgacaaggttaacggttatagtgggtattattagtgaaaaagccctaccgaacaatgaagtcaaaaaaggagtcattatgacctgggagtatgcgcttattggattagttgttggtatcgccatcggtgcggtagccatgcgctttggcaatcgtaaattgcgtcagcagcaagtgctgcaaaacgaactggaaaagagcaaatccgatctggaagaatatcgtcaggagttggttggtcatttcgcccgcagtgcggaattgctggacaatatggctcgtgactatcgtcagctgtatcagcacatggcgaaaagctcgaataacctgctgcctgatttaccaatgcaggacaacccgttccgctaccgtttgaccgaatccgaagcggataacgatcaggcaccggtaaaaatgccgccgcgcgattattccgaaggggcgtccggtttgctgcgtcctgaacatcaaacccgcgattaatctgacctatcaatatgttgtccagatagcgcactcccccgcgctatctggttatctttaatttacccttcttttacagttctatacttaccactccttgaatcaccgacccccgatccctatatgatggaatatcacgtggtcgcttctggcggtaatcgcagtagctttttgaaataagtgaattttttaccggtccaacggtcttagctttcagtgggcctatgccgcaatatcactaattcattcaccgttaggtattgagagagtttaatccaatgaaaaaaaagtcattacttcttagtgcactagctataagcgttggccttagccttgccgctgcaccggcggttaccgcagcccccttgccaatggccgtcgccggacaacctttgccaagccttgcaccaatgttagaaaaagtcctgccagcggtagtcagtgtccatgtgaccggcactcaagcgcagcaacagcgtttaccggaagagtttaaattcttcttcggcccgaatgcgccgatgagcaaagaaagcatccgaccgtttgaaggcctgggctcaggcgtgattattaacgccgagaaaggctatgtgctgactaataatcacgttatcaataatgcagataaaatccgcgttcagttgaatgatggccgtgaatatgatgccaaactgctggggcgcgatgagcaaaccgatattgctctgttacagattacggatgccaaaaacctgaaagcgattcctatcgcagattcagacaatctgcgagttggtgatttcgccgttgcggtcggtaacccattcggtttaggccagactgcaacatccggtattatttccgctctgggccgcagtggcctgaatctggaagggctggaaaactttattcaaaccgatgcttctatcaaccggggtaattccggcggcgcgctggttaacctgaacggcgaacttatcgggattaacacggccattctggctccgggcggcggtaacatcgggatcggctttgccattccgagcaatatggcgcaaaacctaagccagcaactgattgagtttggtgaagtcaaacgcggcgttttaggtattaaaggcagtgaaatgaccgccgacatggccaaagcctttaatatcgacgcgcagcgtggcgcattcgtcagcgaagttatgccgaaatctgctgcggcgaaagccggtattaaagccggtgacgtattggtttctgtggatggcaagccaattaacagcttcgccgagcttcgcgctaaagtcggaacgaccgggccgggtaaaaccatcaaagttggcttactgcgcggcggcaaaccgctggaagtctcggtaacgctggaaaacagcaacccgacctccaccagcgccgaaaccctgtcttcatcattacagggtgcgtctttgagcaacaccgaaattaaaggcgtaggcaaaggcgttaaagtcgataacgtcgctaaaggttccccagctgcacaggccgggttacagaaagatgatgtgatcatcggtatcaaccgtcagcaaactaaagatatcagcgagttacggaaagcgctggcaactaaacctgcggtgatggcgttgaatatcatccgcggcaacgaaaccatttatctattattacgttaatttgtagaaaaatcggacacagcacaatgctgtgtccggttaactcatgctattctgccatcacctatctttcatgccttaaacctcatgtttattaagctattgcgatccaccattattgggctgattgttgccggtatattactggctgcgctgcccgttttgcgttcgcccggttacctgttcgccggaaaagcagagagcacagatagtgaagttcccgttagctacaaccttggggtgcgcagagccgcgcctgcggtagtcaatgtgtacaaccgcagcatgggtgccaccgctcaggacggtctggccattcgcactctgggttctggcgtgatcatgagtgacaagggctatattcttaccaacaagcacgtggtgaataacgctgagcagattattgtggctctgcaagatgggcgcgtgtccgaagccttgctggttggctccgacaatatgaccgatctggccgtgctaaaaatcgatgcgggcaatttgccggttataccgattaataaccacagaatcccacatgttggcgatgtggttcttgccataggtaacccttataacctagggcaaacaattactcagggcattatcagcgcgactggacgcataggtttaagctcatccggtcgacaaaacttcctgcaaactgatgcatcgatcaatcagggaaactcggggggcgcgctggtcaactctctcggcgaattggtgggaattaatacgttatctttcgataaaagtaacaatggcgaaacgccggaaggcattggcttcgcaattcctaccgttttagccactaaagtaatggaaaaactgattcgcgatgggcgagtcattcgtggctttatcggcattaccggcggcgattatccgccgttccacgccaatacccgcaatgcttcctctaatctggagcgcattcacggtattaaagtgaatcaggtttcgcctaacggcccagcggcggcggcaaatatgcaggtcggtgatattatccttagtgtgaataacaaaccggcaatctctgcagtagaaaccatggatcaggtagccgaagtccgtcctggcaccactattcccgtggttattctgcgcaatggcgaacaaatcaccctgaacttaactatcagtgaatatccagacagctgatgggatgaaataatctgagttacaggcaaaaaaagccggtcagttgagaaacctgaccggcttttttatatctgggttcggttaaatctggcatgactacatacctgccagattaaatctcagttagctaagccgcagcaaagcttactccccttgcactcgttcgatgttggcacccaacgcacgcagtttgtcttcaatacgctcgtatccgcgatcgatgtgatagatacggtcaacgatagttacgccatcagcgatacaacccgccaataccaagctggctgaagcccgcaggtctgttgccataacctgcgcgccagagagctgtttaacgccatggcaaatcacggtgttgctttctatttctgcacgagcgcccatacgaatcaattcaggaacgtgcataaagcggttttcgaagatagtttcggtaatcacgccagtaccttcggcaaccagattcagcaggctgaactgcgcttgcatatccgtcgggaaacctggatgcggcgaggtacgcaaagtcacggccttaggacgttcaccgtgcatatccagactaatccagtcctcacctacttcaatatccgcgccggcttcacgcagtttcgccaataccgcatccagagtatccggacgggttttgcgacacacaactttaccgccagaaatcgccgcagccaccaggaaagtaccggtttcgatacgatccggcagtacgcgataaacgccgccgcccaaacgcgccacgccttcgattgtgatgcggtcagtgcctgcgccggtaatttttgcacccaacgtgttcaggaagttcgcagtatcgacgatttccggttcgcgggctgcgttttcaataatcgtggtgccttcagccagtgtcgccgcactcataatggtgacggtcgcgccaacgctgaccttatccataacgatgtgagcgcctttcaggcgaccgtcaacggaggctttaacgtagccttcttccagtttgatttcagcgccaagctgttccaaaccagagatatgcaggtcaaccggacgagcaccgatagcgcagccgcctggtaaagaaacctgaccgcgaccaaaacgcgcaaccaaaggccctaacgcccaaatggaggcgcgcatggttttcaccagatcgtaaggcgcgcagaatacatcaaccccgctggcatcaacaaaaatcgagccattacgctcaattttagtacccagttggctcagtaatttaatagtggtatcgatgtccttcagatgaggaacattctgtaattccaccggttcttcggccaacaacgcggcaaacataattggcagggcagcgtttttagcgccggaaatagtgacttcaccacttaggcgagtccgcccctgcacacgaaatttctccatttgactactctctgttgtcagattcgatgtcgctgttcgccgtagccaacagcattaaaagccgttaagtttgcgatcccgctgccactcttgaggcgtataagctttgatcgataaagcatgaatgcggttatcagcgatgtattccatcaaaggcgcatacacagcctgctgtttcttcacgcggctcatatcggcaaataactcaccgacagcaatcacctgaaaatgactaccgtcgccggtcacgtgtgcttcctgtagtgccaatgcgttcatcagcacatctttaatttcgttggtatccataatattcattctattttcagaggatcataatcagtcaaacatagtagatgaatacggcgagctcttaaactaaagaaaagcccctgtgtcgtaagttacgtacaggggccagaatgccgttatgctcaactaaggtcgtgcgacgcgctaagttgccgccgtgactggaattatttcctgtaagttgtataacgtaatcagcgtcgccaaacgatcgctgacgcctgaaattttcagctcgacgcctcgctgatgcaacgcttcacgtaaatgaaccagcaacgccaaacctgaagagtcaacacgctgtaactgcgccacattcaggcaagttttatccgccagcaaagcgttccgctgctgccacagtggcagcaaggtttcacgatccagatccccaatcagccacagcgtgctgccttgggattcccagcgaagctcatctgccataattatttttgatccaacgtaataggctgtttggcggcgattaacaattgcttagtcaaaccgtctacaccctgagtgcgcaaaatcgatgcccattcattctgcttggtgctgatcatgctgacgccttccgcaatcatgtcaaaggcttgccagtgaccagtttgactatttttacgccattggaaatccaaacgcaccggaggtcgtccattggggtccaaaatggtgacgcggatagcgataatattagcatcacccagcgggtgttctggcgcaatttggtaagtttgaccgtgatataaagccaatgcctggccgtaggcctgttccagatattggccaaaagcgttgaaataggcttcgcgctgagctggcgtggcgcttttgtaataagtgcctagcactaaggctccggcgtatttaatctgcacgaacggcatcagttcttcatgaacgatggtgcgcagataatctggattctgcttaattttaggctgttcgtttttcagacgagtgaaagttttttgcgctgcatcgtccatcagacgataagggttggtttgatccacggcatttgccaacggtgccaccaccaacagtgcgaccattaataaacgtttaaacattcaaatgccctcttaatgaatttgagccgcaggaggagtagaaccccctgccggtgcagtttcaggggtttcctgattattaccgccgcttttgtacaggaactggccgattaaatcttccagaaccaatgcagatttggtgtcctgaatggtgccaccctctttcaaaatactggtgcccatttccggatcttcaaaacccacgtttaacgccagatattgttcgcccaataaacctgaggtacgaatcgctaaagagctggtatcaggaattcggttatattgatcctctatatcaatcgcaactcgcggactgtaatttttggtatcaagagtaatatcggccacccgtcctaccactacaccaccaattttaaccggtgaactggctttcaggccgccaatattatcaaaagtggcatatatccggtaagtaggctgattgccaacagatttaatatccgccactttcaggcataaaaagatgattgccgctaaggcaatcacgataaataggcccacccagacttcagttttcttcgtttgcatcgactcaattcccaaacatcagtgctgtcagcacaaaatctaatcccagtaccgccagtgatgaatgcaccacggtacgggtcgttgcccggctaatcccttctgatgttgggattgcatcatacccattgaacagcgcaatccaggtcacggtaatggcaaataccagactcttgatcaggcaattcagtaaatctgtacgccaatcaaccgcgccctgcatggctgaccagaagaagccgctatcgatacctttccagtccacgccaaccacggagccaccccagataccgactgcgacaaaaattgccgtcagcagaggcatactgattaaaccggcccaaaagcggggcgcaacaacccggcgcaatggatcgatagccatcatttccagactggagatttgctcggtggctttcatcaggccgatttctgcggtcagcgcagaaccggctcgcccggcgaacaataacgccgtcaccaccggtcctagctcacgtagcaaggacagtgagaccatcatgcccagactggcttctgcgctataggtggtcagaatcagatagccttgcaagcccagcaccatgccgataaagaggccagaaacgacaataatcagcagggattgtacccccacgctataaagctgctttaccagtagcggtaactgcttgcgcggttgcgggcaaccaattatggcgttgaacaacatcaatcccgctcgcccgaacgtagcgcaaatattaatacctttgcggcctacggacgctaacgtctgtactaacatgaacactccatcagcctaatagctcggttttataatcgcccgccgggaaacggaatggtaccggcccgtcagcgatgccatccaggaattgacgcacccgaggatcgctattggtttgtaactgcttcggcgttccttcagcaataacatgctgatcggcaacgatataggcataatccgcgatgctaagcacttctggcacatcgtgagaaaccacgacgcaggttacgcccaacgcatgattcagctcatcaatcagcttaaccaatacccccatagtgattgggtcctgcccgacaaaaggctcatcaaacatgatgagttcaggatccaatgcaatagcccgcgccagcgccgcacgacgagccataccgcccgaaagctcggccggcataagatttgccgcaccgcgcagccccacggcttccagcttcatcatcaccgtgctgtgtagcagttcttccggtagatgaccatgttcgcgcagcggaaaagccacgttttcaaacaccgtcaaatcggtaaacaaagctccagactggaacaacatgctcatttttttacgcacgtcatacaggcgatgtctggaaagtgatggaatattatcgccatcaaaccagatttcaccggcgtccggagttagctgcccgccaatcaaacgcagcagcgtggtttttcctatacccgacggccccataatagcggtgactttgcccttaggtacggtcatgttgatatctgtaaaaatagggcgctctccgcgggtaaaactcatcctacggatctcaatcagattagacaccggctgattcatgcttatttatcccttcaggccgtttattacctatttaaccgccaatgctacagtaaatggagtcaataggtgtaacgcgtagcattcttacaacttatttgcgctttttcgtagccaaagtggccataagttttacttttccgacgcccacagtcaaaattagtgcattaagagaatgagagcgaaagctcaaacaaatgccctttcgccaacggaccggggattatacccaataaggactctgcatgtttcttgcgatagcattattaatcgttggcttggttttattggtgtacggcgcggatcgcctggtgtacggcgccgccgttttgtcccgctcgttaggtgttccaccgttaattatcggtatgaccattgtcggcatcggcacctctctacctgaattgattgtttcagttacggccgcactcaataaccaaaccgatatggcggtgggtaacgttatcggctcaaacattaccaatttgctgctgattattggcggagccgcgtttattcgcccgctgacggtaagatcagaaattctgcaacgagaactcccgttaatgttggtggtcactgttctgtgcggctttgtgctatctaacaattatcttagccaatgggatggggttattttactgactgccgccgccgcttttatcaccctgatgttgaagattgcccgtctggcgcacaatgaaggtaacgatattcttacccgcgagcaattatcagaattgcctcaggacagcagtaataccgtggcctgtctgtggctggtgctggcgtttattatattaccgctttccgccaaaattgtggttgataatgccacggtgattgcccgcttctttgggctgagtgagttagtcattggtttaacagtgattgccatcggcaccagcctgccagaattggcgacttctatagccggcgcactaaaaggcgaggatgatatggccatcggtaatatcatcggctccaatatttttaatatcgtgatcgtattgggcgtaccggcgttattgtctccgggtgcaattaatccggaagctttccagcgagattactgggtaatgctggttgtaagcgtcatatttaccctactttgccttgggcgaaaacaacgaatcggtcatctggccggcgctctgttattatgtggctttatcgcgtaccttgcggtgctatttttcgcccctttcagcgcagtattataaaacgagcgggaactgagtatgtcgaacgttgctttgcatccggatgtagattttcaacaggccggtaaacaggtattacagatcgaacgtgatggcctggccgaacttgatcaatatattaatgaagatttcgctcgcgcctgcgagaaaatgttccattgtcagggcaagatcgtcgtgatgggcatggggaaatctggccacatcggttgcaaaattgcggccaccttcgccagtaccggttcaccggccttctttgtacatccgggggaagctagccacggcgatttgggaatggtaacaccgcaggatatcgtgctggccatttctaattccggcgaatccaacgagattctggcattgattccggtgttgaaacgtcaacgcattccattgatctgtatgacgaacaatccaaacagcaccatgggcaaggccgcagatattcatttatgcatcaaagtgccgcaggaagcctgcccactgggtctggcgccaaccaccagcactaccgcgaccttggtgatgggcgatgcattagccgtcgcgctgctgaaagcccgtggctttactcaggaagacttcgcgctgtcccatcccggcggcgcactggggcgtaaactactcttgcgcatcagcgatatcatgcacactggcgatgatattccccacgtcagtcccgatgcttcgctgcgtgatgcattattagagatcactcggaagaatcttggtttaaccgttatctgtaacgacttgatgaagatcgagggtatctttaccgacggcgacttacgccgcgtatttgatatgggtatcgacctgaataacgccaaaattgccgatgtaatgacccgcggcggcgttcgggtacgcccgaatattctggcggttgatgcgctaaatctgatggaatcacgtcatatcaccgcgctattagtggctgacggtgaccaattattgggcgtggttcatatgcatgacatgctgagagcaggcgtcgtataaaggatatggaatgagtaacactgagtatgcggacacttgctacgggccggtaaccgcagatgtaatgcaaagagcggccaaaatccggctgctgatttgcgacgtggacggcgtgatgtccgacggcctgatttttatgggcaacgatggcgaagagctgaaaagctttaatgtccgcgatggttatggcatccgctgcctgctcacctctgggattgaagtggccattatcaccggccgttcagcaaagttactggaagaccgagctaaaaccttggggattactcatctttaccaagggcaacccaataagcttttggcctatggtgaactgttagatacactctcctgtcagcctgaggaagtcgcgtacatcggtgacgacctgattgactggccggtgatggcacaggttggtttatccgtagcggtggcagatgcccaccctctgctgctacctaaagcacattatgttacgcggataaacggcgggcgcggtgcagtgcgtgaattatgcgatttaatactgctcgcgcaggataagctggaaggtgccgaagggttgtcgatatgagtaaaacaaaattttggatcacgctaatactggcgttgattacgctgtcgctgattggctggaacttttccggatttaatcagaaagatcagaatattccagtcgacgataatgaaccgacctaccaaagtcagcatacggtgacggtagtttataatccggtcggtaaactcaattacaaactggtggcggaagatgttaaaaattacaccaccaaagaggtgacctggtttaccaaaccggtcatgaccatgtttgatgaaaatgccgtagcgacttggtcagtccgcgccgatcgcgccaaactgaccgatgacagaatgctgtatttatacggtaatgtggtcgtggacagtttaaccaccacttcgcaattgcagaaaatcaaaaccgataatgcgcaggttaatttgatcactcaggatgtatcctcagacgatgaagttaccctttatggcattgggtttacatctaacggcatgaaaatgcgtgggaatttgcggaacaaaaccgccgagctgattgaaaaggttaaaacctattatgaaatccaaaaataaaatgcgtcacctcctgattgccagctcgcttttggtcgcaagcgttccggctctggcattaaccggcgataccgatcagccaattaatattacgtcggataaacaagctctggacatgaccggtaataccgccactttcacggacaatgtgatcgtgaagcaaggtagtatcgaaattaaagccgataaaatggttattactcgtcccggcggcgatcaaagtaaaacggtgatcgaaggttttggtaatccggtgactttctatcaaatgcaggacaacgggaaaccggtaaaaggccacggccagaaactgcgttatgaagtggccaaagaattcgttattttgaccggtaatgcctatctggaacagctggatagcaatatcaaaggtgacaaaatcacctacctggtgaaagagcagcaaatggaagccttcagtgataaaggcaagcgagtcaccaccgtgctattaccatcccagttacaagacaaaggcccaaacgctaacggccaaaagaagagtaagtaaaaacttatggcaacattaatcgcagaaaagctggctaaggcttacaaaggccgtaaagtggtcgaagacgttagcctgaaagtgaattccggtgagatcgttggcctgctgggcccaaacggtgccggtaaaaccaccactttctatatggttgtcggtatcgttcaacgggacgccgggcgtatcgtgattgatgaagaagatatcagtctgctgccgttgcatgaacgcgctcgtcgcgggattggctatctgccgcaggaggcctctatcttccgccgcctgagcgtctataacaacctgatggccgtgctggaaattcgcaacgacttgtccggcgaacaacgtaaagagcgtgctgaagagctgatggaagaatttcatatcacccatctgcgcgacagcctagggcaatctctttccggtggtgaacgtcgccgtgtggaaatcgcccgcgcgctggcagctaatccaaaattcatcctgctggatgagccttttgcaggcgtcgatcctatttccgtgattgatatcaagaagattatcgagcatctgcgtgacagtggccttggcgtactgattaccgaccataacgtgcgggaaacgctggacgtttgtgaacgagcctatatcgtcagccaggggcacttaatcgcccacggcacgccgcaagaaattctggcggatgagcaggttaagcgcgtctatttaggcgaagaattccgcctttgatgtttgtttttttggttcgtgattcactaagggaaatcgccgtaatcctatgaagcaaggtttgcaactcaggttcagccaacagctggccatgaccccccaactccaacaggctatccgtttgttgcagctctctacgcttgagcttcagcaggagattcagttggcgctggaaagcaacccgctgcttgagcaaacggatgtccacgaagaagtcgacgccaaagaggttgaggagcgggacgatctggatacccgcgaagcccttgaacaaaaggatatgccggaagaactgccgttagacgcgacttgggatgaaatttataccgccggtacgccttcaggtatgggtaatgattacagcgacgatgaactgccggtttatcagggtgaaacgacccagtctctgcaagattacctgatgtggcaggtggaactgacgccgttttccgataccgatagcgccatcgcgacctccatcgtcgatgcggtggataacactggctatctcaccgtgccgctggaagatattctggaaagcatgggtgatgaaagcctgacgctagaagaagtggaagcggtgctaaaacgcatccagcattttgatcctattggcgtagcggcgcgcaatctacgggaatgtctgttggttcagctctctcagtatgcaaaagagacgccttatctgaacgaagccaagttgatcgtcagcgattatctggatttgttaggtaaccatgatttccgcacgatgatccgcttaagtcgcttaaaagaagatacacttaaagaagcgatcgcgctgattcagtctttggatccgcgccccggccagtcgatcaataccggtgagtccgagtatgtgattcctgacgttctcgtacgcaaagaacgcagcggttggacggtagaactgaacgcggacagcattccgcgcctgaaaatcaatcagcagtatgccgccatgggtggcagcgcgcgtaatgacagcgacggtcagtttattcgcagtaatctgcaagaggcaaaatggctgattaaaagcctggaaagccgcaacgaaacgctgcttaaagtagcgcgttgtattgtcgaacagcagattgagttctttgaaaacggtgaagaacatatgaaacccatggtactggcggatatcgcgcaggccgtggatatgcatgaatcgacgatttcccgcgtgactacgcagaagttcctgcacagcccacggggtattttcgagctaaagtattttttctccagccatgtgaataccgaaagcggaggcgaagcctcttctacggcgatccgggcattggtgaagaagttggtggcggcagaaaaccctgccaaaccactgagcgacagcaagctaaccaccctgctttgcgagcaaggcattatggtggcgcggcgaaccgttgcgaaataccgagagtcgttatccatcccgccgtccaatcaacgtaaacagttggtttgacccgaacagagaaggaagacactatgcagctcaacattaccggacatcacgtcgagataaccgaacctttacgcgaatttgttaccacgaaatttgccaaacttgagcaatacttcgatcgtattaatcaggtctatgtggttttaagcttggagaaagtgcaacaaatagcggaagcgacagtccatgtgaatggaggagagttgcatgcaacctcggaacaccaggatatgtatgcggccattgacggtctgatcgataaattagcccgtcaattaaacaaacataaagataaattaaagcaacattaagaacatgatgaccgccagacttatatgccatacagatttcaggatacaggaaggccgcaaaccaaagaaactcataaacttacatcactaagtgattgggtgaatgatagcagccaacaccaagtagtttgaaaaataacggatatatagtctaaagggaaaggttcttcactcactgtagccagtcgcgctacattacctgagtcggcgacatggattgaccagccgccgacatcaggagtgaaacagcgcttaagtgaaagatgagatgaccaacgatttagccatgcaattagactcggtattaaatatcgagtgcaccaaaagctccgttcactgctcgagtaaaaaacgggcactggaaatcatcagcgagcttgctgccaagcagcttaacttgccgtcacaggtcgttttcgacgctgtgctaacccgcgaacgtatgggcagtaccggtattggtaatggcatcgccattcctcacggcaagttagaggaagacacgctgcgtgccgtcggcgttttcattcgtctggatcaacctatcgcttttgatgctattgataatcagccggttgacctgttatttgccttgctggttccagccgatcaatgtaaaacccacctacatactttatctttagtcgctaaacgattagcagataaaacagtgtgtcgacgtttacgagcggcacaaagtgatgatgagctgtatcaaatcattacagaagttccggctgaaactcaatgataaagctagcttttctgccgtaacgctcttattttaccagtgatggattccggcctgtaagccggaataaaagtttctaattgtggcgcataacgccattgagatacctaggggagttgccacatggtgctgatgattgtcagcggccgttccggttcagggaagtctgttgccttacgtgcccttgaagatatgggcttttattgcgtcgacaacttgcccgttgtgctattgccacagctggcgcaaacgctcgctgacctgaacatctccgctgcggtaagtattgatgtccgcaatatgccggaatctccggaggtattcgaacatgccatggctcagttgccggacactttctcaccgcagctgctgtttttggatgccgatcgcaataccttgattcgccgctacagcgatactcgccgcctgcatcctctctccaataagaatctgtcgttggaaagcgctatcgatgaagaaagcgccctgctggagccactgcgctcgcgcgccgatctgattatcgatacctcggaaatgtcggtgcatgaactggccgaaatgctacgtactcgcctactcgggaaacgtgagcgtgaattgacgatagtatttgagtcattcggcttcaaacacggcttacctattgatgcagactatgttttcgacgttcgtttcctgcctaacccgcactgggatccaaaactgcgcccgatgaccggtttggatcgccccgttgccgccttcctcgatcgccatacggaagtgcacaattttatctatcaaacccgcagctatctcgagcagtggctgccgatgctggaaaccaataaccgcagctatctaacggtcgctattggctgcaccggtggtaaacaccgttcagtttatgttgctgaacagcttgccgactatttccgctcccgtggcaaaaacgttcagtctcgtcatcgtacgctggaaaaacgtaaataatgaccgtcaaacagaccgttgagatcaaaaacaagctgggcatgcacgccagaccggcgatgaaattgttcgaactggtgcaaagttttgacgcagaggtcatgctacgcaatgacagcgggacagaagccgaagccagcagcgtgattgcgctgctgatgctggattctgccaaaggccgccagattgaggtggaagccaccgggccagacgaagtgtctgcgttggccgcagtgatcgaactgtttaattccggcttcgatgaagattgatatcggctatttatgcgcgatatcagcctttggttaaaagagtatttggctctttgctggcgtcatcggctggagccttcggtttcaccgcctgattttactcacttctgaatgttttttactcttcgagatatcttcgccctgattaatttatcctcggccctggtcactctcttcctcccgcttaaccgccgtcgcaaaaccgctgcgtaataaaacccgctgggtaatcgtttgctaattgcaaaaaatgcacggtttaccccttgcagagaacgcaggcacgagtataattcgccacaatttgccgggagaatccatgaaaaacagcgagcgttttgttgaatatcatcagattgaaaatcgacaaaatcgtctgccaattggcggtcagctgccgtggtttctgccgttgccaaaccgatcttatcaggcccctcgttgaggggcttttttttgcccgccaaacggacggcgatgtcgaatgccaggcaaatagattcacgattttatattcacgctgattttatatttactctgattttacattcacgctaaagacacaccaggggcagccccatgccacgggctagcacagaggagagcgaaacatggccaatccgttgtatcaaaaacacattatttcaattaacgatctcagccgcgaagaactggaactggtacttcgcaccgccgccagcctgaaaagccatccgcagcctgaattgttaaagcataaagtgatcgccagctgtttcttcgaagcctccacgcgcactcgtctgtcctttgaaaccgccatccaccgcctgggtgcctccgtcgtgggtttttccgatagcagcaatacttcgttaggcaagaaaggggaaacgctggcagataccctctccgttatcagcacctacgttgatgccattgtgatgcgccatcctcaggaaggtgccgcacgtttgggcgcagaattctccggcaatgtaccggtactgaacgccggtgatggtgctaaccagcacccaacccaaaccctgctggatctgtttaccattcaggaaactcaggggcgtctggataatattaatatcgcgatggtcggcgatctgaaatatggccgcaccgtgcattcactaacgcaggcgctggcgaaatttaacggtaaccgcttcttctttatcgccccagatgcgttggcgatgcccacttacattttgaaaatgctggaagaaaaaggcattcaatacagcctgcatgccagcatcgaagaagtggttccagaactggatattctgtatatgacccgggtgcaaaaagagcgtctggacccatccgaatatgccaacgtgaaggcgcagtttgtgctgcgggcggccgatctggccgacgcgcgcgatcatctgaaagttctccacccgctgccgcgtattgatgaaatcactaccgatgtagataaaacgccgtatgcctactatttccagcaggccggtaacggaatttttgcgcgtcaggcgctgttggctctggttttaaacgctgaattggctctttaaggggaaaggtatgactcaggattacaaactacaggtagaagcgatcaaatgtggcacggtcattgaccatattccagcacaaatcggctttaagctactgtctctgttcaaactgaccgcgaccgatcagcgtattaccattggcctgaacctgccgtccaatcaactcggccgcaaagatctgatcaagatcgagaacactttcctgaccgagcaacaggcaaaccaactggcaatgtatgcgccacacgccacggttaaccgcatcgataattacaatgtggtgaagaagctgacccttagcctgccagatcgtattgacggcgtgctgacctgcccgaacggtaactgcattagccgtaacgaaccggtcgattccagtttccaggtaaaagctctgcgagatgaagtgttgctgaagtgcaaatactgtgagaaagagttcgaccatcaggtggtgatgcaggccgattaatccgggaagactcgctgtctccgccgcgacttactcagcggcggacactgtgaactaccgcaatcattttatttccttaggttgccgtaattcccctccgccctataatagcggtgattacagagtatccctttccgctttacgtaaaccaggagtcaacatgtcacgtattatcagcactgagcttgcccccgcagcgattggtccttatgttcaaggtgtcgatctgggcagcatgatcatcacttccggccaaatcccggttgacccaaaaaccggcgcagttgccgaagacgtttcagctcaggcacgtcaatccctcgaaaacgtgaaagccattgtcgaagcagcaggcctgaaagttgcagatatcgtcaaaactacggtattcgtgaaagacttaaacgatttcagcacggtcaacgcgacttatgaagccttctttgctgaacataacgcgccattcccagcacgttcttgcgttgaagtcgctcgcttgccaaaagacgtaaaaatcgagatcgaagctatcgccgttcgtcgctaatcccgacggcgtgccgatcacggctgactcacgtcagccgtgatagcttagcgtcgcatcagacactcccgtcataacatccctgtctgttcatcctccctgatttgctaattccttcataaagagagcatcctgcccttaattgcggccatagttataatgtatatataaatcaatacattgcataaataaaacagtttatgaataaagtagtttatggaaaaagtagcgctataatccaaaccggggcgttactttttaatccagtaaataccctcataaggtcgaagttccatcgcctctggatgaactggggcatcgtcgtaactgctcatcagcaatgaccaaccgcctaactccagattttctggctgccatcccatcggcttattgctaagattcgctaccaccagcaaacgtttatcctgccaactgcgtaaataacaccacaggctaggatgttctgggcaaagatcctgataatcaccgtaggtgaaaatatcctgctgtttgcgcaaggcaatcaggcgctgataggcgtaaaacactgagttttcatccgccagcgctgcgctaacgttaacttctggatagttgttgcacggcgagatccacggcgtagcctggctaaaaccggcgttagcactgttatcccactgcattggcgtgcggccattatctcgtgacttagtggctaaaatcgccaataactcatcggcctgacgcccggactcactcagttcagcaaacatattcaggctttcaacatcgcgatactgctcaatcgaagtgaagccagggttagtcatgcctatctcttccccttgataaatatagggagtcccctgcataccgtgcaataccattcccaacatcttggcggcagggacgcgcagcggtccttcatcaccaaaccgggaaacaatgcgcggctgatcgtggttacaccagaacagcgcgttccacgcctggttatgcataccctgctgccaagtggagaaaatactttttagttcaaccagatccggctcggccagcgaccatttttcaccgttcagataatccactttcagatgatggaaattgaaagtcatcgacagctcgccaccgtttaacgccgcataacgctggcaatgctctaaacgagtggacgacatttcacccacggtcattaaaccgcgaggctggaagacatcgcgactcatctcttgcaggaactcgtgaatgcgcgggccatcggtatagaagcggcgaccgtccccatcaaaatcgttggggaagtcctgctgtttggataccaaattgatcacatctaaacgcagaccatcgacgcctaaatcggcccagaactcgcagacttttttcagctcatcccgtaccggctggtgctcccagtttaaatccgcctgctcggtggcaaacagatgcaaataatattggccgctttccgcatgccactgccaggcattaccgccgaattttgagcgccaattattaggtagctgatccccttcaccgtcgcgccagagataaaattgacggtacgggctggccggatcttttgccgcctggaaccaggcatgttcagttgaagtatggttgaacaccatatccattacgatacgaataccgcgctgatgagcggcttcaaccaaggttttaaagtcttccaacgtgccgtaagccggatcgatggcacaataatcagccacgtcgtaaccgttatcaacctgcggagagagatagaccggcgtcagccaaatagcatcgacgcccaatttttgcagatagtccaaacggctagttacaccggctaagtcaccgtaaccgttaccggtagtatcctgaaagctttttgggtagatctgatagatgacaccgttttgccaccagggaatgggattattcatagcgtgaactcttattcatttaaaaaattgccccgtaatcggtacggggctcgacgcatatcagaccggtaattccccacggctgtctttgcgtttataaaccagaatagtcaggaacaatggcacaataatcgccaccagcatcgccaacgaataaatcgcccagaacttcggctgtatggacaaaattcccggcaaaccgccgacgccaataccgttcgccataacgccacttaaaccgcaaattagaccagcgataccggaacccaccatggcacacagcattgggaagcgatatttcaggttaatcccatacatagccggctcggtaacgcccagataggccgaaatcgccgctggaaccgaaatttcgcgttcgttaactttgcggctaataatgataatgcccagtactgcggaagcctgcgcgatattggataaagcgattaatggccacaccggcgtgccgcccatgctttgaaccatttgcatatcaatcgccaaggtcgtttgatgcaccccggtaatcaccaacggcgcgtacaggaaaccaaacagagccgcgccaatcggcgcaaagctgccggtcattaccgctttcactccccaagccacgccatcgccaatcatacggccaaacggcccaatcaacgtatgcgccaggaatacggccaataacagagaaacaaccggaacaataaccagatacaggtaagcaggaatgattttcttcagattgacttcaatccaacctaaggctagccctgccaaaatggagggaataacctgtgcctgatagcccactttctcaatggtgaaccaaccaaagttccatacctccggcagttgctgtcccagcatgtaggagttcatcaactgcggcgaaaccagcgtaatccccagtacgatacccaataccggcgtaccgcccatttttttcactgtagaccagcaaatcgccaccggcagatagaagaaaatcgcctcgcccaacagccacaggaaatcgtagatggttttccacgccggatgcgcctgcgccagcgtcattccgtcggacataggaatatcgccgatcacattgcggaaaccgaggatcaacccgcctgaaatcagcgccggtaacaacgggaagaagatctcggcgaaatgggaaataccgcgttcaaaccaggtcatgttctgccgcgccgccaacttggtttgctctttatcggcttcggcatgaccaatggtggcaatcagagccttgtagtaatcatcaacatctggcccgataaccacttgaaattgaccggcgttggtaaagcagcctttgaccatccgcaagttttcaatagcttttggatcggccttggccggatcgtttaagacaaaacgcagccgggtaatacagtggctgacagtggcaatattctccctgcctcccaccaatacgatcagttgatcgatgtcttgttgctttactttgctcatttcaacgtacctttcataaggtgggatcccgcgcattgactgaaataaacacgcgaataattaaattagtggctcattaaagattagctactgatttgtttttatgaaatgggaacgttcccaagctgtgccgaagatcacaatttaacggctttttttgcttacttaaccagcaaaaaaagcatcaattggatcgatcagatcagtttcccggggatgatgatctgctgaatagcgaggccattatttaactgtccgagcagttgctgagccgcttgaacgcccgcactaccataacctaattcaacagaaaatgagttaggaaacaggaagttaagcaaaggcgcgttaccgattccgcacacctgaatatgctgtttcccctgctgttgcaggtacttactgacgcctaaagcgatggtatccgaagcacaaaccagcgcagacgtgtcgggtttgatcacctgagctgcctgctgaaaaccactttgatagctgagctcacctaacgtcaccgttggggtcaatccatggcgctggcagtagttcaaataggattgatggcgacgcataccggtggtggcatcagagggttgtacgccgatatagctaatgtgctggtgaccggctttgcgcagtttgtccatcaataacgtcaccgcaccatcatcgtcataacaaaccgaagaaaaaccgggatattcacgtgctagcaccaccattttatcctgccacggcgcaagcatttcagcggtcaagccggtaaaaccaaatacaatcacaccgtcaacgttacgctggcgcaaaatattcaggtgctccgtaaccagctctgcatcaaactggctttccatcaagataggatcatagccctgctgataaaatagcggcaacatggttcgtaccgcctgattctcagaagcagaatccagacgcgaaacaataatccctaccactttatcgctctgaccgcgcattgcccgcgctgatttagatggcgtaaacccttgttgacggataaccgcctccacccgctcacgggtttgcgggctaacgctgccttcattattcaatacacgcgataccgtggatttccccacgccgctcatacgggcaatatctttgatcgtcagacggttttgcatggtttacctaaggtttaggttaaaaagtataaactggactaattatttatctttaccctgataatagaaaggttatcccgcctataatcaaaagtatgactcatgatatacccaataaattttgagccacactcaggccccaatagcgggaatccctgaaagcttagcccattaaatcgatgggttaagtaaaaatagccaacggcgctatggatcaaaaagtgaaaggtatcatgccgttagatacacagatttcctacctttacgcggagtgattctgtaaaggtttttgtcaccgggtggatgtcgcctagcgcctaccctatcttttgtcttaccggaggttaattacccagtggaccccgttccccaatcggccccctacggctggctctggtaaggtgatgctccgttttcgctgctgccttaccagaaacaatctggtaggcagtaacgtgtcatagattcgctcgttcctgcttagcaatatttttgccattaccacggcagttttgtcgtggatgtaatcaggttcagcataatgaaagtgaaaaacctcgcccggcaaatgcttaacgcattgagccgcagtctgccacgccgccttatccgccgcgaagctatgctggacggcttgccgcaaaaaggtgtggccaaagaacttcccgcagaactggcgcagcaacgcctgcactgtgccaatgaaacgccgcagcagctctatgaccgttttagcagtcatccggaggggctgacagagccggaagccaacgccattcgccaacgccttggcgataataccattgaaaatcagcaagctgtgccttggtggttacatctgtggcactgttatcgcaatccttttaatctgctgttaacgctgctagcgctgatttcctacgcaaccgaagatctgaccgccgcgttggtcatcggcgctatggtgctgatttccactctgatgcattttattcaggaagcccgctccaaccaggccgccgacgccttgaaagccatggttagcaataccgctacggtgattcgcagcgatgcccataccgggaaaagcgagcatcgggaaatccctatttcccaattggttaccggcgatatcatcaaactctcagcaggagatatgatcccggcggatctgcgtattttgctcgccaaagatctttttatcagccaggctgcgctgacaggcgaatccttgccggtagaaaaaatcgctaccagccgttatcccgatgaatctaacccattagaacgagataccctgtgctttatgggaaccaatgtggtcagcggatcggcgctggctatcgttatcggcaccggtaatcagacttatttcggtcagttggccgaacgcgtcactcatcaggatgagcagccaaatgcctttcaaagcggcatcagtaaagtcagttggctgctaattcgttttatgctggtgatgacgcctattgttttactgatcaatggcttcaccaaaggcgattggtgggaggcggcactctttgccctttcggtagccgtcggtttaacgccggaaatgctgccgatgatcgtgacgtccactctggctagaggtgcggtgaaattgtcgcagcaaaaggtcattgtgaaacgtttggatgcgattcaaaactttggcgcgatggatattttgtgtaccgataaaaccggtacgctaacgcaggataaaatcgtactggaaagccataccgacgtctttggcgccaacagcgaacgtgtgctgcattatgcttggctgaatagctatcaccagaccggtctgaaaaacctactggatgtcgcggttcttagcgcaatggcggaatctgcctccaccaaagcgctgctcgattaccgtaaagtagacgaaattccctttgattttgaacgccgccgcatgtcggtggtagtggccattcaagccgattatcacgaactgatttgcaaaggtgcgctggaagaaatgctcaccatctgcagccatgttcgtcagggcaatgaagttattcctttgaccgaaatgctgctgactcgtattcgccgcattaccgatgagttaaatcaacaggggctgcgagttgtcgccgtggccaataaaatcttaccggcgaatcatctggactatggcgtagccgatgagtccgacctgattctggagggttacattgccttcctcgatccaccgaaagaaagcactgaacccgctctgcgggcgctgaaacaaaacggcgtgaccgtcaaaattcttaccggtgataacgagctggttgcgcgaaaagtctgtaaagaagtcgggctttccgtcgatcaagtactgcttggtagcgatattgagcaaatgagcgacgaggaactgaccgccgccgcccacgctactacggtatttgccaagctgacaccgctacacaaagaacgtatcgtgcaaattctccgtaatgcaggtcatgtcgttggctttatgggcgatggtatcaatgatgcgccagctttacgggcggctgacataggaatttccgtggattctgcggtagatatcgccaaagaagcggcggatattatcctgttggaaaaaagcctgatggtattggagcaaggggtcattgaaggccgccgcacctttgccaatatgctgaaatacatcaaaatgactgccagttccaacttcggtaacgtattcagcgtgctgattgccagcgcctttttacctttcctaccgatgttgccgctgcatctgctggtgcaaaacctgatgtatgatatttcgcaaattgcgattccatttgataacgtcgatgaagatcagttgaccaaaccacaacgctggaacgccggcgatttggggcgttttatggtgttctttggcccgataagttcgatattcgacgtgctgactttttctctgatgtggtgggtatttaaggccaacacgccagaaatgcagactttattccagtccggttggtttgtagaaggtttgctgtcccaaacgctgattgtgcacatgattcgcaccaaaaagattccgtttattcaaagtcgcgcttcatggcctctgtgtttaatgacgctggcagtggtcgtggtgggtatcggtttaaccttctctccgctggctggtttcctacagttgcaggctctgccgctcagctatttcccatggctgattgtgattctgaccggttatatggtaacaacgcagttggtaaaaggctggtttgtccgccgctatggctggcaataacggtcagatagccagtatcccaaacagatagcaggaggttgaatatcctcctgcttttattctggcaacatgatatggggtattaaaaaatggctacgctctcttattttcgggattagatgcgccctaaacaatcgatcgcaatgcctttaaaactttcaaagttctggctactgagcagacggctcattgagcgttcacggacaaaggtaacaaacagatcgtagatagccatcgcttcttcataatcacttttactgattgccagcaggaaaataacgtaggccgtttccccttccccccacgcaattccttgcggagccaaaagcgttaccaccacggtctttttagccaacaggccaagggagtgaggtaaagcgattccttcccccagcatggtggaaacgatagcttcccgctcgactaccgaagggtaaaaatccgcatcgacgaaaccttcaagctctagttgctggcaaactttgctgaacaactgcgcctgagtcagcggttcattaacccgcacaaaatggttttcatcaaagaacttttccaacatataaggccgggtgcgatcgactaaaaccagttttcctaattgctccagctgatattccgttggaaaaggcgacatcaccactaccggcctatttttttccgttaaacgcgcattggagataataaaatcttcggcaatagtcgctatattttcatattcccgtagagataccgtcctagttaccacgatttgaggatacttgcgggaaatttgcgcctgaatcatacgaatcgtcgaatttccagtatcacacaccagcatgacctgcggatgacgctcataaccaatattataatgccgctctaaccctaccccgatatgcagtactaaatagccaatttcattttcactcaggctgtaaggggaatacttcccccaactggaaaccgcagccagcgttacatcataggccattgggtaatgctgtttgatattagataacagtggattagggatagtgatctgatacttaacccgcgtaatcatcgtcttgatatgggtcagcaaatcgatgcgtaattgcttatcatcctgcaaattatagttatagtgagagttaatatacgaaaggatgtaatccaccagcgtttcttcatcgtccgcgtttatttcgctgggctggctggtactaggctcgctgatttccatccgccgtgcggcaatattcacccgaagataagcctcttctgccgctgaaatctctttgccagccaatagctgtaactcattggccaaacgtccggaagccagttttaccgcttcatctacatcttcagcatcaaaatcagatagcggatagccttcagcgatacgttttaccgccaccgcacagtaaaaaatcaggtactgctcaccttcatcagacaatcgcacggcgtattgagacaataattggtgcaataaatcggtcagcgccggcatcgccgcatcgctaagaaaaacattttttaacagtgggttgtcgctgtcctgaacatgcagctgaaacagtaaatcggtcaggcaggaacgaatggctagctcggtgccaaacagcttcataccatagcgaggcttagcctctatggtcagatggtaacttcccagacgctctctcacctcagccatatcactttgcagcgtaccacggcttacaaaccattcatcagccaaatcttccagcttcaatgcaaaggctgaggtcagaaagcgaataagcaaatactgaacccgctcggcggcggtacgcggcgtcaggttcgtcttaggcgtttgctgctgcaatacctgaaaacgttcggcatcatcgatcattaatcgataaccaaatccccgattatgaataaaacgcgcaccatagtgctcaagaatatcgttcagcgcagtaatatcagctcgtaccgttcgggtcgaaacggcaaagcgctttgccagttcatcctgcggcagagtttcagattgcagcgcatcgaacatataagccaaacgttgataaggaaatctcactgcgcctctccgctgatgtagggcatttctgccgaatacaggctgctcctatcgggaggaacagcctgccagtgctactcttttgccaatggcgtaaaaatcatttgcgatggactacctaccggaatgtaaccaggaataaagctcaattttccgctgctttgatccaccttgaaccgggttatgttatcgctacgttgattcattgcgtacaggtagtgaccaccgggatctaaaaccaacgtacgcgggtaatcaccacgcgtccatacctcctcaatggctttgagatccccctcgccatttactgcaaactgcccaatgctgttatgcaaacggtttgccacgtagaggaaacgcccatcttttgacagtgttaaacccgctgcaaaattggttccacgaaacgcttttggtagcgatgacacactaactacttgttccaaagtccctttctgagtgtccagacggtaactggtcagcgtagaggcctcttcattaatcagaaatagtgcttttccattcggatggaaaacaaaatgacgtgggccagcgcccgcagaagatgcactgatatagggcggttcatttggtgttaatgcacccgttgttggatcaaaatgccattgatagatccgatccagacccagatcggtggaaaaaacaaacttcccgctgggatcgcaggcgatcatatgagcatgagggccgttatgatcgctggcggcaaaactaccttcaaccgcagcagccggtttagccgctcccgctgggccttcatcttgatgaacagagctggccgcctctatttttccatccgtagccaaaggaaaaaccgccacagaaccactgacatagttcgccacaaataaatggctccccgaaggcgtcagagacaaataaaccggccccgcaccttgcgcatcaacctgatttaacagagttaagccgccgtcttgcggatcgacacggtaggctgcaattgaaccgtgtttaccgccgttgtaatccgatacctcactggcgacatacagcgtcttcccctgagcgtccgccactaactgagccggattcgccagttcactaaccagcgttttattctttaattcaccggatgcaggatcgagctgtagtcgataaacgccttggccgttcgggttataggtgccgacatacgcaaattgcttcaaattttccgctccgctagatttttctgccccataagaagatggatgaaatcctgccaatagagccaaagaaaggccaaccgcaagtaaacgcggcggaatgacattagacgcagggtatgtttcagagaggaatggcctgttacgcatatttttcccttatcactatgacgcgaccagggtatgggtctagctaacctaacatccagatttacaggtaaaaacagcctacaccacacccgataaagaatgaggcatctcagcgatgccccttctgaaagcttatgccacgattctttttactatgttcagcaacgtgataacgtcctgcgggcgtgtatcacccgtttcgctatcgataattgaactatagatatgaggaataattttgctgactccggcatcgagagcgatctgtaaaattgtctcaaaattctccagatcgatgccgcccgtcggctccagccaaaaatcatgtttggcgcaggcctcggccacacagcggtattcctcaatgtgttttaacccacccatcgggaaaaacttaatcgagctgccgcccatatctttcaacatggcaatggcggtttctaccggaacaatcccatccggcgcagcggcgctcagtgggccagtggatatcttcacgtatcccacttttccagtcggtgaaatcaatccattcactatggtttcccactgaccaagcagcgcccggcttgggcctacgccggtaaatacctgattaacatgctgtggctgcacctgttgagcaattaaactcaccatagcggattgatttgggtcccctgcgccaagccctactgacagcgcattgtctatccgttcagcatattcgcgcatatcgctgaccgcactttcaacgtccggatagtttttagataaaacaccaaccaaaacatgaccttcagccgcctgccaaatagcctgcgcgttggatttggaacccgctagcacattgaggcaaactcgatttcggtaataattaggggtcaatttcatcgattaatctccctgaaccaagcgttgaatgcaggtagaaatgacctcaagctgtgctgacgtgacactgcgcacgtccacctcaatcttgccttcatttgctttgtacgcgcggaaataaatcgccggatcgccgtccatcaaagctgcgaccaactctggcgttgaacgcccaattttgacttcgtcgaagctgatttcggttcgggcaatatcccggccggcactatcccataccactttggcggagataccgggcaaagcattcaaatgactgataaatggcgtcattttttcaaccatttgctggccggtggtctgttcctgttgaatatagctctcgatagcctgagtcaggccaataatgctttccttacccactttcatcgcccgaccaataccattcgactgtagcttaacccaatctacgtaggtctttttgcccaagactaacccgctggttggcccttcaattgccttcgcgccactataaatcactaaatcagcgcccatctgatagtagcaggccagatcttcttcggcggccgcgtctacaatcagtggcagttggtgcttacgcgcgaccacaactgcctgttcaactgacaaaatgcttttttgtacgcaatggtgggattttatatacaaaatcgccgcagtattcggcgtgatcgccgcttcaagctgatcggcagagcattcattggcatagcccgcttccaccactttaccgccaccgagggtcaccatcgtatccaccggggcgccgaaattaacgttgtgcccttttggcaacacgatctcatgggggacttgcaacaccgcagcttgcagattaaccaataaattggcgttatctttcacgataacggcagcaactgactgcgcaattcctgccgaagcgcaggaaacgaccaccgcactttccacattcagtcgctctgcaatataagcaccggttttattcaccagatctttaacttcgaagaagtgatttagcccgaatgcaacggcttcgaccacgtcctgccgcggtgtagaaacgcccaaaatcgtcatccgaccggatgcattaatcacgctttttagctggtacttttcatagatcgaagacatcgtgagatttcccttcgtcagttaacaccaagtcaccggcgacaaccgcagccaatggcagcaaatatttctctccggttacggatttaccttctgaatcgacaaatacttgaggccgttgtttcacttcgaatatagttaaatcggcatcaaagcctgcggctaatacccctttaccggtcaaacgtaatgcctgcgcggcattttctgttacgcagcgaataacttgttcgaggttaagaccaatggtaaagaatttagacatcaccgttgccaagctgtgcaccggcccggtaatacggttgcggcagtaaatatcagaactgatggtgtgagggtaaattccctgtttaatcgcctgctcagcaacatcgaaactaaaactggcgctgccgtgaccgacatccaataacacaccacgttttaatgcgcgttgaatagactcccgcagcgtaccggacggggtcaaaatacggttgggtttaccgttatagcagtgggtaataatgtccccttgggtcagcaaatcggcaatttcatctagatccggcggattattgccaatatgtaccatcaaaggtaattggttattttcttgctggatttctttggctcgaaccaaaggcttaatgccgtttttccccacgacgctactgctcatccgagccttaatcccaataataaagccgggattgcgagcgattgcctcgcttacgctggatttatcgatctgctccatatcggctaattcgttttgcgtcacaatgccggttttagcgatatttaaaaacgcgtaaacctgtgttttcgccgctcgcgtcaaggtataaaaatcatccacgtcattggcaccggtactccccgcgtcaataaccgtagtcacgccgctggccacgccaattaaatccgcatcatcatgataaattggcgaagctgggtagcaatgaacgtgtgaatcaatccagcctgcgctgacaaagtactgccccgccaaatctatggttgccttggcagaaagaaaatcgataggattttcattacagagtgaaactgaagtaatcttgccgtcatcaataacgatatcgacctgatgcccttcaaccaaccttgcccgtttgataataaagtcatgcattatctttattctccgttaaatatccgggtaacaagatgtgagtggctaaatgatgatggggcaaaattgatcatttaatttcgccccgtaatatcaagaaatagcgaccgggaatagagaacctaaaatcatcgcgcctaaaatcgcaccaccggtaattggcttgctccataaatagaacaataatgcgccagccaaagaaccaataccgataggaatagaagctgccattgcagaaagaataatcaagggtccaagaaaacgtccggatgaattacctgcgcccatcatgacatccgcgccgtaagttgaatcactctgattaatggtgaattttctagccagaataataagataaccgatagcaatgccaataactaacccagtgaccagtgaagctgcaaaattggctacggggaaaacaaatccagcgcccaataataatgcaggaacccccaaacctactccggtttgaatcgccccaccaatatccagaatacctaccagcgagccttcgataatgcgtgcgaataagaagctggcaccgaatgctgctactgcaccataaacgccggtatccatacctgctcgcaacatggaaacgaaagccacttcgttaaatgcgccaatcccatagagataatacatatgggtaccagcaaaaacgccggaagataatacgccaacaaatatcgggaatgaccagtcggcataccaaaaaccgtctttggtttgttcatccatcatcaagctcctgtagaaatgttatttaccgcttaatgcgttatgaatgctgtcgagccagactggaacgcccagactgaatgactccaggaatttcatgtcaaagccacggaagaaaccgctcaaaacaaacagtaagacaataactgccatcatgatttttgtgactttattccaaccgctttcttctacgcctttaccgattaaaatacccagaaccagacctggaacagcgttccccataattaactgagccagaccgccaaaaatagtggcccagaaaccggaacgacgaccggcatcaatagccgccagccagaaaataaccggcatcacggtattcaccagaatattagccgccggtaccaatactttaattgcggtaacctgcaatgcttccggtacagccgaagcggtggtatttaagaagctaacaacgataacgccaataatgccgcaggcaatcgccatttttttcgggttatgcatggtctcggccacattgcgatttttaatcatcaatgctgctgcaccccagttaggaataatgcgatggtcaacatcttgcgtaaacgcacccgccgcaacggaagacgcccatgcgttaaagaagaagcccaaaccaaaggagaaatgcgaggctggatcgccttcacaagagttcagttcacccaaggtacgaaatgcgcccatgccctgaaccgtaggcgcatgaaacattcgcgctgcaccggcaccgacgccgacaccaaccagtccgccgatgataatcgacttaaaaagaatgattaaaaacatcagtatatcctttcatttatagccaacgtttttatttagagacgaaaacaaccttatctgtattaatgattgttacgctcacggtaatatctaaggctacggtataagtcctcttttcgcggggaagaaagaagaacagaaatttctctttttttaccgactcttccgcgcttaataccttcacgtcctggggttcaatgcgtaataagatattttgtgtcgacttcaataccgtattctggacatgacctaatgcgctggcgaaagccttagctttagtatcccctttccctttgaccttaacctgggtggtatattgttctttcattacggattgccatgtttcttaatataagcttcaaccagtttctgaccgagttcttctttatccataaaaccaaaacctaatactttacaaccttcatttattgccgttacgccctcttcaatagagcgcattccgtatttcgctttatagccatatttagtttgtgccgtaatagcgcctgcgccaccgctgccgcaaaatgaaataccgaggtcagcctgttctttattcatcacatcgcccaatttcatatctgcggcaacgccaggaatcacaatagattttgccccggccaactcaataccctgaccgactttctgacctttacccaaacggtcgccaatcacaacggtaatttgactcataattttttctccaaggctgaatttatgaattattatctttggctacttcaaaatgcacggacaataaataggcttcctcaatgggcaaattccccaatgaatcgactacttgctgagccattctcattgaatctgctgatatttcgtcaaataatgacttatccacttccggcagtggttcaccagtaatagagcgcagcaccatagcccgaatatgtgaggtcaacatctgctgctgaacatcattggtataaatattctcggcattcagcatggccattatatccgccaataaccattgagttttctcaatgccatcatcgacatcgagtttattctcagtatttacagatacggctccatcattcacgctagcgttcctctgtactgtgctgatttattttctgactgcaaagaaaagttcatggcgttaaatcttattcctttcctttacgctatagccttaccctacccctaagcgtaaaaagtatgtagcctgtttttttccagttcgaagtggaaataaagtgagcaatattgatccaattcgcaaaatccgcggtactgggccttcccagtgaattttcacttttttaaagctagcgctatccataaatgtttataaacgataaaacagaaaaaaacgccgaagaaataacaggaaaatatcatgcaaaatcttagaacttgcgatgattcagctattttataagaagattaaatagggaaaacagggtaagagaataaatatccttattttatttcagcataaaaaatggcaattatggaaaataacgagatcaagatcaccttttatcaaaagataaagcaagaaaagcttcgtgatccggatctctttcttttctcgccagaagcgcctagtatcagactaataatctgatattttctaacaccccctctcctatggcgcgggggtgttgtttttatgttttctgtacttgaattggagagtggtatgaccaagccaaccatcacgattaacgagctggacgccgaacgtttggatgcgttgttggcacaacctgcttttgctgacacagcgattgccgatgcactgaatgaagagctggatcgcgctgacattctgcctccgtcagaaatacctgctgacgtagtcaccatgaatagccgggttcgttttcgtgatttgaataatcaggaagagcatattcgcacgctggtctaccccgcatcgctgaaagatagtaacgaacaaatctcggttatggctccgctcggcgccgcattactgggattacatgttgataatgagattaactggaaactgccgggtggggatgaagcccgcattaaggtattagaactgctgtatcaaccagaagccgccggtgaatatcaccgttaataccttcgcgttttagcgatgaagggtggtagatcgtcgatctctcacccttttatgcatcaagtgttaaatccatttacttctcaatactctttattccttaagcgcactcattatttagcctgactcattctttcaagctatagcatcttaacggtattttttatggtaagtgttgcgggtgtctttgaattcctgcgccacctttcgcgcctcttccagcttgccttgatcggctaaagccagagattgatcgatttgaccgatcagtatggttaatccatgacgataatcttgtacttctgcgctatctggcgccttgccctttaatttaggcggaatgcctttctgcgcatccaacgccgcgctgcgcatcccctgtaggccttgtttgaagctttccagcgaatcggttttcagaaccgcactgtaattgctcgcaatggtatccatatcttccgcaatatcatttgccattgccaaagtgctagcgcttagcagtatggcggccactaacacttttattttctgactcatgctcacgctccttataattattgttaatagtttgtatcactcataacataggtggctagcagggaaacaggcaatagaatttttgtaaaacactgaaaatttaatggtagcagcaatgagacataaaaatggccgagggcattagccatcgaccattttactacagatttttatgccacaatatttgaacccattcccgctaatcgagcgtgattaacgaaaaaaatccaaaggattattcaccagcaattttcatttctggaagtaatattgaaccgcactgaatattactgcgtgtttcaatatcactgcctgcgctaaccatattgcgcagcatgtctttaagattacctgcaatggtaatttcactgaccggatactgaatttcaccgttctccacccagaaaccggcggcaccgcgagaataatcaccggttacggtgcttacgccctgacccatcagttccgttactaccaggcctctgcccatcttcttaagcattccggcgaaatccagcccttgcccagcaatacgccagttatggattccgccagcatgaccggtgcttttcagacccagtttacgcgccgaatagctggtaagcaggtaggtttgcagaacgccgtctttcacaatttcgcgacgctgggtacgtaccccttcgctatcaaaaggcgtagaagccaacccgcccaacaggtgcggatgctcttcgatggtcagccattcaggcaaaatctgtttgccgagatgatcgagcaaaaaggtagatttgcgatatatattcccgccgctaatggctgaaaccaaatgcccaaacaggccggtagcgacttctgcagcaaataacaccggagccttcatagttggcagtttacgcggtgacaggcgagacagggtgcgacgagcgcactctgcgccgacccactctgggctggccagatcttccaaccggcggctgatgctgtaagcgtaatcacgctccatatcaccgtcaaactctgcaatcacgctactggatatcgaatggcgacttgagcaataacttttcagcataccgtggctgtttccgaaaaccttgatgccatagtgactgttaaaactaccgccttcggtattggtaatgcgcttatcggcctttaatgccgcctgctcggctctagctgccagttgaatgccgcgatcggcgtccaactccgcgggatggaacagatccaactccggcgcatcaaacgccagcaaggatttatctgccgggcctgcataaggatccggcgaagtatagcgagcgatatccaacgcagcctggacggtgcgggccactgcgtctggattcaaatcagtggtggacgcgctgcctttccgctgctggtgataaacggtaatccccagcgcaccatcgctgttgaactccacgttttccacctcgccaaagcgggtgctgacgctaatacccgtagttttagtaacggcgacttcggccgcatccgaactggcgcgagccagttccaaagcttgtgcaacagcttgttccagcgttttacgctgttctgcaacttgagtgactactttcatcgatctgccataattaatgagataatcgttcaggaaagtgccgtgacggcgtagtaatacgacgatttacacggataaaatgtagagcgccatggctttgagtctaacaggatctgcgtacaatttcgcagaaagccaacaacctgataggattagcctctttttaaggaatgacaccatgaacaaacagcccgaagactggctagacgaagtcccagaagataaaaatgaagatgatgatgagattatctgggtcagtaaaagtgaaattaaacgcgatgccgaagcgctgaaagatctgggcaccgagctggtagagctgggcaaaaacgcgctggaaaaaatcccgctggacgaagatctgctggctgccattgaactggcgcagaagatcaaaaaagaaggccgtcgccgccagatccaattgatcggtaaaatgctgcgcgcccgtgatgttgaacccattcagatcgcactggataagttaaaaaaccgccataatcagcaggtttcgctgttccataaactggaagtgctgcgcgaccgattggtagaggaaggtgatgacgcggtgcctaccgtgttggatctgtatcccgatgccgatcgccagcaactgcgtagtttgatccgtaatgcccagaaagaaaaggcagccaacaagccgccaaaagcattccgtcaaatcttccagtacctgcgtgaactttccgagaagcagctatgatcggacggagccgggagtctgccacagaccccggttccgactaacaaatattaaagcgtaaactgccagacaattcttcttccgcctcttcgaacagtagaataatcgcgccaaaacgccgtttccggcggtgattgagatgaataaactcaatttccaccggtaaactgatagctccggttaccgtatcccacaatgcatccagattggcgccgaaatcttcgcccaaagaaaacttctgcgaaaaatcgtgataaaatgcgggaagatccgcgatatggtcaaaatcaaacgtcactttcaccatcttctcactccacccgaacaaaattcttataatgatcctgagtcagataaatcaggccatcattggaatagagcagccgatccgttccccgatggccacactgatagttgacgtccgcttcacgccatatccgattattcgccttgggtaacgaaccttcacggtttgaaaaacgatcgccaccgatagctttccccggtaatacctggcataaattgccgtctttcggattccaaccttgctcacgcgcctgctttttcgtgatataaaaatccggcaaccggttgttttgttttaggtatttcaccactttttcatgctgggtcagttggtcgatagagtcagttcggctgactttattactctgctgatggctacgcgtctgctcctgactatcggcctgcgctatcaccggtgttgacgtcggcacagaggccggcgctgttccccgctcgtttccctgaatgaccgcgacaattaataccaccgccgccgccagaattcccaccagacgtttgttcatgattttccaaatcaatttgctcggctaaaaaagagagctgacgccgatgagcgccagcgcttttccgttgatttattggctataaattacctaaatgtaaggttttcacttccataaactcatccaaacccagcaccgaaccttcacgacccaaaccagattctttcacaccgccaaaaggcgctaattcagtagaaaccgaactatcgttaatgccgatcatgccgctttccagcgtctcggacacgcggaatactcttttcaaattttgagtatagaagtaagccgccagaccgaaaggtgtgttattcgcgcgctcaatcacctcttcttcggtcttgaaacggaagcaggctgccagcgggccaaaagtttcctcacttgctactttcatctcttcggtagcctcggcaatgacagtaggctggaagaagttgccacccaatgcgtgacgttcaccgcccgccagcagacgcccgcctttcgccaatgcgtccttgacgtgatcctcaactttttttacgccagcagagttgattagcggccccaggtttaccccttcatccatcccgttgccgactttaagttttttcacttcggcagccaaacgggtgacaaactgttcgtaaataccatcctgaatatagaagcgattgacgcagacgcaaacctgaccagcattgcggaatttgcaagccatagctccggcaactgccgcatccagatcggcatcgtcaaagacgatataaggcgcatttccccctaattccatcgagattttcttcatggtttctgcggcgttgcgcattagggttttgccaacctcggtggagccggtaaaggaaattttacgcactttcgggctggccataatgacatcgctgatggcgtgagtgtcgccagcaacgccatttaacacgccggccggcacaccggctttctctgccagagccagcagtgcgaaagcagaaagcggagtgttattggcaggtttaatcaaaccggtacagcccgcggctaacgcaggacccagcttgcgagttagcatcgccagcgggaagttccacggcgtaatcgctgcgactacgcccaccggttcacgagtggcaaagatacgcgcgccggtttttgccggaggaataatttcaccgttggcacgtttagcctgctcactaaaccactgaatgaagctggcggcataatctacttcacccaaagcttctttcaagggcttaccttgctctgcgaccattaattcggccagatactgacggttttcgacgataagctgataccagcgctgtagaatctcggcacgctgtttggccggcgttttacgccaggcagggaaagcctcatgggctgctttgatcgccgcctcggtttcacttttaccggctttagccacctgagccaccaattcacccgtggctgggttcaatacatcaaaggtttctgcggcctgataccattttccaccgacatagtagccagttttaaacaattcatgtttctgtaacggattatccagatgtgttgaagcggacatctttaggcctcctgatcggcaaagggctgcccacaataggcaacgaggaaggggggagcgtgagttgagtatagcccttgatggtggcaggaaaacaggctccctgccgccaatagcttattgaatgagcgcgtgctggtatctgtgcaacatatctgcaagacgtttgaccgtttgagtaacagagacaggagcatgatattcaaccagtttttgctggtaatcacttaattcctgtagcagacggaaaaagtagtggcgtcgcttttgctcgtttttcgacgtcatcacccgatcggcggtatggcgaatctgtttatggaaggcgcttaactcggcgttgactggaatctcggtattattcagcctttgatgagcgacaatcagcaacagagccaaacggtacttggcgatatcaccggggaacatcatcagcaattggttgagctgctgatataacgctggcaaatggttatcgctgcggcgggcttggttagtggtcagagccgccaccgcgctgtacacaaaacggttgagcaacgttctaccggtacgcactttagcgttatcacgaatcagcagcagcacgatcagagaaacaaaacagccgaccatctggccgagggcgctatccagaaacaggctaacgttgaattccatggggttgctgagcaccaaaatgttaatagtacccgccagcgtgcccaaggagcccagccgccgtttctgcacttccacgccgataataaatgccagtaaccccaagctaatgcataacagcagtaaactttgctgagtcgaaggcagaataaacatgaagtacagcgctcccatcggcaacgccattaacataccgatgagaaagtccatcgccaccatgcgcggattgggcgttcgcatcgccagagaggttacaaccgctatcatgaccatacagcccgcccccgatgtccagccggtccacaaccagaacaggccgccgatcgcagtagcaataccggtgcgtaggccattgatcatcgcgtgatggccctccgccgaggtgtgttttatttcaggctcggtggttaacagctcttcttcaacgctgctaatactgctgttggtatgaatgcccttcgccagcaacaaatagcgagtggcggcaccaacccagctactgatggtcaaaggcacggcactactgtgactacccgcgaaatgctgacgtaacactttcatttgcttatgaatatcgccgcagttatctgcgggtgtactcagtagcgctttcagttcatcggttagataatcaggatgattaatcaaaatcaaataggtttcacaggcctgagtaatcatagcgagggattggccgtgtaacgcctgtaagcggcgatcgcagcgctgccagcgtgaggattccatcatcagatagctacgcatccctttcaatgcactggtatttttcaccaaatcattccacgcacggtcgatatcttctttatccgcagagtggatgcacaaatgcagcaggtgatactgatccaccagcagtttatcgatcagtcgatcgatatcctgtttgatggatcgcggagaaaacagcagatccgcgatcaccgcacagacgatccccagcacaatctcgctacagcgttccaccgcaaactgcggcgttagcaacggcgtttctccggtagtcacaatgatgatcaatgcggtgtagccagctagaccgaaagcgtaggaattctcgactttcaccagcgaggaaatccaggtacagacaccagcccaaacacagcacagtattagcgtcagtaccggtgctcttatggtcagaacgataatgatcaggccaccaatacagccaatgaatgtgccaataatccgcagccagccgcggtgacgaatagcgccggaaaaaggttcgccaccggcagcaaaggctggtccagcagcaacaatcgccgccgtcatcaccgaccaacgcggagtttccaactgaaaatggaagcccagaaacagcgccgctataatggcaaagctcagtttgaacgcaaagcgatagcggataaacctttggctagtgaacatacttccccttagccgaactcacgcaggcgatgcattagctgaatcaaacccgaagcatggcttggctcgcgaccattcggcccggtaatcactacggtggcagtggtgcccgcaggatacggatgctgttgatcttcctcatctaaacgaacttttaccggcacacgctgagctaaacgaacccattccagattattatcgatcgtcgccagccccttactatcggccttgctgctgctgttagtcacccctgcggatacgctatcgacggtgccgtgcataatacgatgactacccaacggggtgatttcgacgcgatcccctctgcgtacaccttccagcttggtttcttccagataggccagtacgtaaaacgtgtcttttttcactagcgctaccgcagtagcgcctcgggtaataaattcaccagcatgaacattcaagttagtgacccaaccctgagctggcgcacgcaccgtggttctttccaaatcgagttttgccagatcgcgcaccgcgatggcttttgccagttggtgtctgacggtttgcaacacgttggtggactgatcgatttcttcctgtgacaaagcctgcacccctaaacgcagacgacggctggactcacgctgtttctccgccgctaatgtttgatagtaggccacatcggcttcggcactggccaacgcctgctcgtaacggggacgatcgataacaaacaatacctgacctttttctaccaattggttatccaccaccggcacatcggtaattaaaccgctgacgtcgggcgcgatggcgaccacgtcggcggtaaatttggcatcacgagtccagggggattcggtataaaacgcccagattttaaaaatggccattacggccagcagtaccacaaccaaggtgataccgattcggattatttttatcagaaatgtactcacggtaacctcaggaaaagaaacgagacgttaaataaaaaaggcaacagaacagcgccgtattaaacaaagccgggtgccagacaaattcataaatacccgtcggctgtaaaacccgacgcagcagaaaaaacagcgccagagaaatcagcaactcgagaaatatcggtggaaaagacagaccgaaaacaaccatcaccggaagcaaactcattcttttatccttattttttgggtaccggttggtttaccctaccgctggatttataccgtcgagtgaaaggtcaccgttcgctcgaccgatcgcggcactaacctgaaataactatcaggtgcctgaagtgttaaacttgctggtatctgtcagaggaaggtgcgaggacaactgaggcggtgcgtattaacaccgaaggttatttctcccgaccccttatattagcctgcttattatcaactgatctacaatctgtgatctaaatcacttttaagccagagttaacaattcattcagagagaacaatggaacgattaaaacggatgtcggtttttgccaaagtcgtcgagtgtggttcctttaccgccgccgcccggcagttaggcatcagcgtttcttccatcagccagaccgtatccaaactggaaaatgagctacaggtcaaactgcttaaccgcagcacgcgtagcattgggctgaccgaagcgggtcgtatctattatcagggctgtcgccgcatgctacaggaagtgcaggaagtgcatgagcagctctatgcttttaataatacgccaaccggcacattacgcattggctgctcctcaaccatggcacaaaacgtgctggcaaccatgaccgcagatatgctgaaagcttatcctggcctatcggtcaatttggttaccgggattccggctccggatctgatctccgacgggctggatgtggtgatccgcgttggggctttgcaggactcaggcctattctctcgtcgtctgggatcgatgccgatggtggtttgcgccgcaaaaagctatctggctcaacacggtacgccggagaaacccgcggatatggcgaatttttcctggctggaatacagcgttcgccctgatagcaacttcgaactgaccgcaccggagggaatttccacccagatatcgccgcagggacgttttgtcaccaatgattcgcaaaccatgattcgttggctcaaagccggagccggtatcgcctatgcgccgctgatgtgggttattgatgaaattaaacggggagatgtggaagtgctgttcaaccgctaccattcagaaccacgaccggtttacgctttgtataccgaaaaagacaaaatgccgctgaaagtgcaggtatgtattgattatttgacggaatacttcaagcgcgtggctgaaatttatcaaggataccgctgagtaaatctggcctccacaagcgaggaggccagcgaaaatcaggccgtgccgccgacggtcagattatccagtttcagcgtcggctggccgacacccactggcagactctgcccttctttaccacacacgcccacgcctttatccagcgccagatcgttgccaaccatcgaaatttgctgcatcgcctcaatgcccgaaccaatcagcgtggcacctttcaccgcgttggtgattcggccattttcgatcatgtaggcttccgaggtagaaaacacaaacttaccggaagtgatatcaacctgcccaccgccaaaattcggcgcatacagaccgtattccacgctagcgatgatgtcttccggcgtggatttaccagccagcatgtaagtattggtcatacgtggcattggtaaatgcgcgtaagactcacgacggccgttgccggtcggcgcgacacccatcaaacgtgcgttcagcttatcctgcatgtagcctttcagaatgccgttttcaatcaatacgttgtattgacccggaacgccttcgtcatcgatagccagtgagccacggcggccttgcagagtgccgtcatccaccacagtgcatagctctgaggccacgagctgccccatttgaccgctgaataccgagctgccacgacggttgaaatcgccttctagaccgtgaccaaccgcttcgtgcagcagcacgcccggccagcctgcgcccaatacaaccggcatagcgccagccggagccgccacagcgaacagattcaccaaagccatacgaacagcttctttggcataggcgtcggcacggacatccccatcaaccggttctaagaaatagtcatagccgaaacgaccgccgccgccgctggcaccgcgttcacgtttgccgttgtcttccaccagcacactgacagacaaacgcaccagaggccgcacatcggcggccagcgtgccatctgtagccgcaaccagaatcaattcatatacgccggtcagactggcgctcacttcctgcacccgcgcatctgcggcgcgcgccactttatcgacccgatgcaatagcgcgattttttcttcacgcggcaagctttgcagcggatcgagcagaggatacagcgaagcgtgggcaatctcgcccaaggtgtgaactttaccgttcccattatcacgcacaatactgcgggcagcctgcgcactttggtgtaaagcattcagggtaatttggtcggcataggcaaaaccggtcttttcaccgctgaccgcacgcacgccaaccccttgatcgatattgtaagagccatctttgatgatgctgtcttccaacacccatgcctcgtgatagctggactggaaatataaatccgcataatccaggcggcgttcagccaactgacccagaactgaggaaagatcctgatgggtcagtttgttagcagcgagtaactgctcactgacaaacgagaggctcatattattttcactctttattggatgaaacttcattgaatggcggcaccagacttggctggaagcgattatgctgcatcaccggcatctgcttacgtattttttgcaggccattagcctcgaccctcactttcagggcagaaacgttatctggattctcgattaataccttgccccaagcgtcaacggccatcgaatgaccccaggttcgacgggttaacccatggctgccaacctgtgccggcgccaatatcatacattggttctcaatagcccgcgcccgcagtaacacttcccagtgagcttcaccggtaacccgggtaaatgccgccggaacggaaataatttccgccccttgcgcgcgcaacgcctggaataacccagggaaacgcaaatcgtaacaaatggtcatgcccaaacgcccaaccggcgtatcgactacggttagatgctctcccggctgataggtatcagactcacgatagtgtccgtgtgtatcattgatatccacatcgaacatatgaattttgtcgtagcgcgcctgcaattcaccctgatcgtcaaacagcaggctgctcgtggtaatgcgatccggagactcacggctaatcatcggcatcgagccaaccagcagccagacgccgtaacggcgcgccatttcacggatggcctgctgtaacgggccatcattgtgacgctcggcctgtttacgataagccgcagaatcggcaaataacagcgcattttctggcgtcatcaccaatttaatgcccgaattcaactgcttaatctgttgctctatctgagctaggttagaacgggtttgctcaccgctacaaagctgtaaaagtgcaacattggcatttttcatggtgccttattctcctttagctggcgtaacacctcatggatatccggctgatccagactaccggttatctgatatcgaatcagagatattttactccacaacggcccgagcactttggtggccgcaaaaaccgccgccccaatcaccgggttaatcacaaatgccgtagccacaccgacggtcgcggatatttccggcgtaataacggcttccatgttgatttggcgtttcaccaaatcaacactgccgttcatggcgatatctgccgccagaccgtcgatcaaaagatcgttagtatgcaccacgccagatttcacgctggcggtgccgcgaatcgaatcaaaggcaaagtcacggctgaaggtatcgctgaaatccagctgtagtttacgcaacaatgcgtcgaagctgaccagccgcagcagttgcccggcgcggcctccgcccagattcaccatggcacctttgcttagtttggcgctcaaattgccattaagggtttcaattcgcggctgccaaggcacgccctgccacgccagcgttgcgttgccgtcaaaaggtgcatctttgagcggcgtgctaataccgaagaatgacagagtgtcatcgattttactgccagaaaccttcatcctaaccgacgtgttattgccttccgcactttgctgccattcgccgttaaccgccatgtgagccttagcgacctcaatcaggccattcttaagacttaacactttgttgttatgggagatatcggcgctcactttgccaatattctgccccataacccagcattcttgacagcgaagctgcaacgctggccaatcgcggaacgaaacatcatgacttagtggagaatcttgcaacgccgcttttgacaaaggtttatcaacatcttgcgccgtccactgcgggttgtagtagagatagcgaatatctgcccgccacggcccgctgctggctacgcgcacgctgccatccacttcgcgccctttggcgctaatatttgtcccattcagctgcggctcaatccgcagggtcagattatgccaagcctggccgcccagcagcagttctggcgtttgtagctcaatgcgagaaggtaatgtgaactggctctggctggcagattttttaccgatcatggatgacgcctgcggagaggctgatgctagcgcagggccaattagcgccagccaacgttccccatccaaagggggcaaattcaccaccaaccctttttcagcaggtaatggcgggacttttttgctgtcggtttgccagaccgctttactcaattcgactttctgatcttttaacaaccattgactgttaaaatgattcgttcctgccgctgaaccagaaagcgtgaatccattgaggccacctttggcctgaacgctcaccggcaaagattcaccgccttgagtatctagcggcggcggtaagcgactgctcactttctttaggtctgcgttgacatctaccagataacttggctccccgtgcttcggcaactgcaccgcaactttgccctgccaaccgaagctacccttcagctgtttggctatttcagcgggaatctcggtgattttggctggaatccagtcaccgcgcaggttaaccccaacctgaaagttgtctttttgctcttccgtggtgaaatttaccgtcagcggctgaccaaaccagttagccgatatttcatcgctcgacagattgccatcgctaaagcggaatttaccgctgacattttccaactgactttgcagtggcttaatcaataaactgttgttgtgcagcgtcacttcaccggtagcgtgcgtgatattgccttctaccaagggaatatccagatgtaagcgcccacttacacccccaccaacctggagttcatccaatgcactccccacggaatcatgtagcggcgtatcgttaaagtaatcatgaacatccgagcctagccccgctacctgcgcatcaacaaacaggcgttctttcagataatcaggaatattggcgctgatattggtgccggtgacgttccccagcattgcccgcggtgcattcatccacaggccgtcattgaggaaattcaggtcgatagccagattttccagcgctggccattccggttggaactggaaggtcgcattacgcaacggaacataaacctggaattgaccctcgttatgggtataagggaaataatgtggattaccgttatagaccaacgtggcgttatccacctgcccgccctgaatcgcgccggtcagataatccaccaacgctttccccatcaaaggctgagggaagtaacgccaggcatctgcgccgtcatacaggcggataccggccagaatattcagccacggctggcctttttccggctgttgataacggaaactaccgtttgcccacaaagacttggcttttacatccagcttatcgctccacagctcccagcctttatcatccatgcgccagtcaatgtcgccctgagcgctgctgacttccagcggtgcgccaaacatgtcaccgtaaggcaaaatgctgtcgtgcagatttaccgccagacgcccatggctgacggaaccgctcaatgtgccagagaaatgattcacgcccggtaagagttcccaatgctgccagctgacatcttgccatttagcctgaaaacgggtcaattctggctgttttagaggaatatccagcgccagcgcattcaaatgcccctgcggttttaaatctccccaacgggccagtaaatccggggtaaacaaagaaatggtcggtaacagcggcccaattcgctctaactgaaggtctttggcacgaaggcgtaattcttccggctgatccgggcccagcagtttattattttccggcaaccacagcgccgacaggctcccttgcggccacgcctggccgtcagtggttaaattcagctgtggggcatcaatctgccagccatttccctgacgacgcgcgtccactaccagttgatcgacagcgagctgatggggttcaccttgagtagtccaagcggcttgcccttgttttagcagcacattcccactgtaaatatcgccgcctttgagcgtcagccaagctgccagactaaattcggcgctgtctaatccggtattattatgcaaccagcggctgatccaaggcttcacgtcaatattatcagcctgcatatatacagtgccgttattcagaatgccctgatcgtcgtgtaaatccatccgtacctgaaccacgccgtgctggccattaatcgtcgataggctgatctgcccttcggcgcgatggcggttacgcgagttaagccaggttaactgaggaatttccagctcggcgctggaaccagaaggggtaagaaatgaaatgcggctgttacgcagatcgaaatgatccaactgacgcagaaaaatatcggtgaagtggctggattcaaaagaacggttctgatcacccggattaatcagcggacgatccaaatccagctgtagctgatggaacgtcatatcccgtagctgccagcgccagtgcagcaaagattgccagacatccagcgctagcgtgatgcgctgaacctgcaatttggtatcaggcaactgggcgcgcagatcccgtacttccagcgtcgggccaaaagtttcccaactgccttgaataaaaccaatttccagcggaattccgctgacggcctgaatcttagcctgtagctgcgcacgatagtcgttgagctgcggcaacatcaaacgaagcccactcaccaacaatgccaccacaacaatcattgtggcgcctgtcgctaacaaaatcctgggcagtcgcctcacgcatctctccttgcttcccgctgcaaggggcgcagcggaaatttattacatcatcaccacgtcaaactgctcttggctgtagagcggttcaatttgaacttttacctgcttaccgacgaaaatttccacttcggccagcgcatgggattcttcgctcttcagcgcttcccctaccgcaggtgaggcatagaccaggaatctgtcggtatcataggcatggtgaacccgcacgatttctcgcaggatttcatagcataccgtttcgacggatttgaccgtgccgcgaccgtgacaagtaggacaatcattacacagcacgtgctcaatactttcgcgggtgcgcttgcgggtcatctccactaatcctagctgagagaaaccgttaatactggttttcactcgatctttgctcagcgcctgctctaatgagtgtaatacacggcgacggtgctcttcattactcatatcaataaaatcaatgatgattatcccaccgaggttacgcattcgcagctggcgagcaatggcctgagtggcttcgatattagtattgaaaatggtttcatcgaggttacggtggccgacaaatgccccagtgttgatatcgatggtggtcatagcttcagtttggtcgataatcaggtaaccaccagatttcaattcaactttacgctccagagaacgttgaatctcgttttctacatcatacagatcgaaaataggttgtttgccggaatagtgctccagcttattggtcatttctggaatatattcgcgggtaaattcgatcagttgctcataggtctggcgggaatcgacccgaatgcgatccaaggccgcgcccgcaaaatcccgtagaattcgctgcgccagagccatttcgccgtacagtttgcatttagttttatcacgttttttacgcagctgtactttggcccacagacgttttaaaaacgccgcgtccgcggataactcttcttcaccaataccttcggcggcggtacggataataaatccgccctgctcatcgcaatagctggccactgtatttttcagacgatcgcgctcagcttcgctttcaatacgctgagacacaccaacgtgcgccgctccgggcatcaacaccagataacgagaaggcagcgtgatatccgtagtcaggcgcgcgcctttggtgcccagcggatctttgaccacctgcaccatgagatcctgcccctgacgtaccagttcagcgatatcacgtacattgaaattcttttgctcatccccagccacgcattcggtgtggggcataatgtctgaagcatgaaggaaagccgccttatccaggcctatatcgacaaaagccgcctgcattccaggcaaaacccggctaacgcgacctttgtaaatgttaccgacgatgcctcttttcgcttcacgctcaatgtgaatttcctgcaggatgccaccgtcgatgtaggcaacccgcgtttcagacggtgtaatattgaccagtaattcagctgtcatgtattcctctcacatcacgtagcgcgaaaaaatgactcagtagttcatgggtttctaccaacggcaggccgacaacggcgtgataactgcctttaatcgccctgacgaaacaaccacccttgccctgaataccgtaagcgcccgctttgtccatcggttcaccggtagcaatatagtcactgatttcttgttgagataacacgcggaatgtcacatctgtcacgaccattgtgccgagtaaatcctgtttatcggctaatgcaacggcggtcatcacctgatgctgctgcccggacaacgcacccaacatttgcgcggcatgaacagcatctcgcggtttttccaaaacctgtccattaagcaccacaatggtatcggcaccgagtaccggtaaatcccactcggcaaccgccactccggcgcgcgctttatcttcagccaaacgtcggacatagtcctcggcggcttcccccggattacgctgttcctccacttccgttttcagtatttcaaacggtaaatcgagaagcgcgagcagttcacgccgacggggagaacctgaggccagataaagggctgtcattggaaaaatccttattgcaccgcaaacttacggcgaatcttacgcattaataagaatagccacggccataagataccgttaattaaactactccagaaaacttcaggtcggaacgaaacgttaatcactaagaattctgaccagaacaccacaacatccatcgttagcgacagaagcatcacgattaatgcctgctgccacagcgccatattgcggaataactgaaacttaaaggccaccagataggcaatgatgctcaatgccaacgcacgcacgccaagagttgaacctaaaatcagatccaaaatcaggccgagaataaagccgctgccaacgttaacccgatgaggcaatgccataacccagtaaatcaggatcaacgtcagccatgacgggcggaacatataaatttcttttggccacggcatcacctgtagcaccattgcaatcaggaatgatagccagataacccagcgcccattactggtgtaacggttcatggcgtcgcccttaccgctggcgcgttcgccggaggcggattcaaactggctggtgccggtgggccgaccatttcgctggcgcttggcaatacctgaggcatcatctgcatcagacgctcattagccacccgatgtacttcattcggcggcaacggcaaatcgccattgcgatccgcgccccacagcaacagcaaataacgcagacgctgtaaatcggccattggacgagcctgaataacggtataggcgcgctgattatcgactttaaccgaagaaaccaccgccaccggataaccttctgggaaacgtccaccgaggccagatgtcaccaaaacatcaccaacacgaatatcagtattgcttggcaaatgttcgagcaataagtcgtcgctacagccgccaccggcagcaataacgcgaatgtcattacgcaagacttgaatcggtagcgcgtgggacgcatcgcatatcaacagcacgcggctggtgaatttgctgaccgccactacctgcccgaccacgcctttatcactgatcaccggctggccttcatacacgccattatcggtgcccttatcgatcaccacctgatcgctataaggatcggtgccgctggaaataacctgcgtcaccattttttgttcgtcctgacgcagcggagagccgagtaactcgcgcagacgtgagttttcctgcttaaactggccaagcaactgtagatcggtatttttaagcaacagttcctgacgtaacgcacgattttccagctcaagctgttggcgcgttgcgatggtttctgaaacgctgtctaaaactttacgtggcccattggccagaaaatagaaggggctaactgcggtgtccatataggtacgaattttaacgaacgtaccgagccggctatcgacaataaccagcgcaatggctgcaagaacggcgaagaaaagtcgcagttgcagggatggaccccggctaaaaatcggcttcataaattatgcgtattcctcgacaacaaaaaggaggcactaaacctgatgatgcaataccttcatccgatccagccctccttttttggctgactattcttcgctgaacaaatcgccgccatgcatgtcgatcatttccaacgctttgccaccgccgcgagctacgcaggtcagagggtcttctgcaaccacaaccggaatgcctgtttcttccattaacaaacgatccagattacgcagcaatgcgccgccgccggttaacaccatgccgcgttcggagatatcggaggccaattctggtggacactgttccagagcaaccataaccgcgctaacgatgccggtcagtggctcttgcagagcttccagaatctcgttggaattcagagtaaagccgcgcggaacaccttctgccaggttacggccacggacttcgatttccagcacttcatcacccggatacgccgagccgatgctgtgcttgatacgttcagccgttgcttcaccgatcagagagccatagttacgacgcacataattaatgatcgcttcatcaaagcggtcaccaccgatgcgtacagaagaggagtaaaccacaccgttcagtgagatcaccgccacttccgtagtaccgccaccgatatccacaaccattgaaccggttgcctcggaaaccggcaggccagcaccgattgcagccgccattggctcttcaatcaggaacacttcgcgagcaccggcaccctgggctgattcacgaattgcacgacgttctacctgggtagcaccgactggcacacacaccaatacgcgcggacttgggcgcataaagctgttgctatgaacctgtttgataaaatgctgaagcattttttcggtcacgaagaaatcggcgataacgccgtctttcatcgggcgaatcgcggcgatattgccaggagtacgccccagcatctgcttggcatcatgacccacagctgcaacgcttttgggggaaccggcacgatcctggcgaatagcaaccaccgagggttcattcagtacgatgccttgtccttttacataaatcagggtattggcggtacccaagtcgatggacaagtcgttggaaaacatgccacgaaatttcttaaacataacgaaaggataatcctgcaagctgggggcgaaaaataaaatccgcctactttaccaaccacacggagcagcgacaaggcgcaaaaacgtcctactccggtgaaaaagtggctacgttattccaatcaagttccgctgaataaggtatatgcactaaaacccttgaataaaggctcattataccccccagtcgacgcgtcgaacggtgtaacacagcacataaaatctaacatttaacctgatttaccgccggaagtaagtgcctaccaacggtctacggaaatggctgggacattctacgttaatttttgctcaacgatcaggctaaacatggccctgttacgaatattttttctgctctgggttcaaaagcatcggcgcagcaaaaaaattgccctgtccgccataaacccctttctgtagcagcgtttcccattcttccctggtcaccacttctgcggcaaaaactttaacattcgtaccggcacaggcaccagtaagactttgcacaaatagctgattttcaaggcggacatcaatacttcttaccaatcccggatgtaacttaatcatttccacccgtaaagacttaatatatgaggtactgaccaccgtcaatccggcctgcgaaaccatcaatctacaacctaaccctaacaacaatcgaatcacagggcgtagggcctcaatatgttggcagacatccgcctcagccagctcaaagataatccgctgacggtaacttttccggcactgtaataaggtatcccgtagccaacgcttaaaggaacgttgcaataatgaatcaacgcttatggaaaatgccagcgtttcatccggccacagcgccaacaaaggaattatccgacctattttctgtcgatcataacgttcggccaacccgagcaaacgtaccaacggagtaaactccgccgctatcagctcttgttcgccatcaaatatccggctgatgatttcacggtgatgaatttttccatcacaggtaatgaccggtttctgatacaacctagggccaccgttaaccagcgttttttccagcaatgttcgccacttaacgctaccgcgtcctttctccggcacctgattgtcatagacataccagctattgcctccatacaacgccgcatttttggtagcttgtccagcattatccataatttgttccgccgcctgcccgtggcgataggccacgataccaatattgagcaaagcgtcgcgatcgataatctgcggcgctggcatggcacccgccacatgaaccaactgtgccgccatcacatcggcgtctttcagagttttatgcggtaataaaatggcaaaatcgctgttggcgtagtgagctagcagtgcggaaggataacggtcgacaaaagtggaaagcagattcaccatcgaatgcatcaattcctgcacccgtgatttgtcgtaaacctcacttaacgcatcaaaatcgggtaagtgcaccatcatcactacgccgtgggcaccgggttcttcaagctgggtagtcagctgattatcaaaaaacagcgcgttattcaggccggttttagcgtcctgtgcggcataggagcgaatcaaagtatccaattggctgcgttcttcacgcatttccgccaaatccagcagcaaacggtcgagagcatggctggcataaggcggccactcatgagtttcaccgcgcagtacattctcacgctcgccgttgagaatacgtcgcgctcggttctccagttgctcctcacctgccgtttgttcccgcagccagcgaaaacttaaaaacagaatgaccgcaatcatcgccaccgccaacgacaaaatcaccgctgcatacattgaacgagtgtaactggtgagcggatcgatataagtcaggcgcatcgaactgccgggctgctgtaataatggaagagacagttcgcgatagccgctattggtatcccaggcggtataagtaggaaggactttcagataaaacaattgatgctgcgaattttcaacgctgatttcaaccacgccaatagcgcccatcatcaacggcaaccagctacgcggaacttcaggtggatcggttagtaaggattgatcgtacgcggtcacgatagtattaaggcgatgttccatttttttctggcataagtagaaaaaactgaacgtactccctaacaacattaaacacatggccaatacgaccagtaatgccataaacgcagaaagtttggttgtaaatcgcatccctcagccttgcctaccgcagttaaatggaaagtattcctcactcctttagggcaggtactatatgataaaaccgaccacggacgctggttttttaatgttttatacgacaaaaacgcaattttttacgaaattcgcatccattgcctcatccttaccctgcataaagcatagtcactgatataagcatcgaggccaaatttgtcctcggtcagccttcgaacttgatgtttccggtatagtcacccaacctgatgaatacgaaattttcgatcgttattagtcgatcgttcgttattagtcgatcattgttaacggcacttcttagggagcctctaatgcgcgcactgttactcgaacagcacgatggcaaaaccttggccaacgtccgtgatatttcaccggaacaactgcctgcgggtgaagtcacggttgatgtcagttggtctagcctgaactacaaagatgcactggcgatcaccggtaaaggcaaaatcattcgtcagttccctatggtgccaggcattgatttcgccggaaccgttcacagcagcgaagatccgcgttttcacattggccagcgggtattgctgaccggctggggcgtaggcgaaaaccattggggcgggctggcagaacaggcgcgagtacagggtgaatggctggttccgctccccgcaggtttggatgcgcgcaaagcgatgattatcggtaccgccggtttcactgcgatgctgtgcgtgatggcgctggaagaaggcggagtcacaccagaaagcggcgaaattgtggtgaccggtgccagcggcggcgtgggcagtactgcgattgctctgctttcagctctgggctatcaggtagccgctatcagtggccgtgaagcgaataacgactatttactgtcactcggagccaaacgggttctgccgcgtagcgatttcagcgatgcatctcgtccgttggaaaaacagctatgggctggcgctattgataccgtcggcgacactttactagccaaggtgctggcacagatgaactataactctaccgtcgccgcctgcggtctggccgggggttataaactgccaaccacggtaatgccttttatcctgcgcaacgtgcgtttacaaggtgtagattctgtcatgacaccgcaaccgcgccgtcgggctgcctgggagcgtctgttgaaaacgttgccagaaagcttctatcaacaggctggacgtgaaattacgctagaacaggctcctgcggtagcagccgaactgatggaaaatcaggttactggccgaaccttggttaaagttcgctaattagcccattaaaatagagtcatttcattgggcggatgtttcgttcgcccaatctcagaaatttcatattttctgctaacctctcgcttttacagccttttcacaccatgctttattccattacggtcagtatgactttctctgcccgatggagtaatcacatgagcaaacaacgcaaattaaccgaatctgacgtcacgccggaaagcgtgttttatcaacgccgtaaggtgctgcaagcgctgggtattaccgccgccagtctggcattgccggtttcggctcaggctgacctactgtcttggtttaaaggtaaagatcagcccaaggcaccggcaggcaagccgctcaccttcagtaagccaccagcctatcatcctgactgggaactgacgccggaagacaaagtgactggctacaacaacttctacgaattcggtctggataaagctgacccggccgctaacgccggtggattaaaaaccggcgattggcagattcgtatcgatggtgacgtcgccaaaccaatgacgttgagcatcgacgatttgctcaaacgcttcccgctggaagaacgcatttatcgtatgcgctgcgtggaagcctggtcgatggtggtgccttggatcggtttcgagctaggaaaactgctaaagctagtcgaacccaccagcaacgcgcgctatgtggcattccaaaccttgtacgatccggatcagatgccgggacagaaagatcgctttgtgggcggcgggttgaaatatccctatgtagaaggtttgcgattagatgaagcgatgcatccgctggcctttatgacactgggcgtgtacggcaaaacgttaccaccacagaacggcgcgccgctgcgtctgatcacgccgtggaaatacggttttaaaggcattaaatctatcgttcatattcgactcactcgcgaacagccgccaacgacctggaatctcagcgcgccgaacgagtacggtttctacgctaacgtgaatcccaatgtggatcatccgcgctggtcgcaggctaccgaacgctttatcggttccggcgggattttagacgttaagcgccagccaaccctgctatttaacggctatgccgatcaggtggcttcgctatatcgcggcatggatttgcgggagaatttttaatgcgtctgagcctgaaacaggtcaaagggttgaaagtagcaatctggctggccgcctcattgcccttcttctggctaattttatccgtcgatcagggctggttcagcgccgatccgtccaaagacattcagcattttaccgggcgcatgactctcaagctgctgctggccaccctgttggtgacaccgctggctcgctatggcaagcagccgttgctgatgcgctgtcgccgcctgttgggagtatggtgttttgcctggggaaccctgcatttagccagttattcagtgctagagctggggctgtccaatatcggtttgctggggaaagaattagttacccgcccctatttaactttaggtattattagctggctattactgttcgcactagcagttacatcgacacagtgggcacagagaaaaatgggacctaactggcaaaaattgcataatttcgtttatctcatcgccatcctggcaccgattcactatctttggtcggtcaaaactttatcacccttgccgataatttacgcaatcgcagcaattattttgttagcactgcgttataaaaaatttcgccaatggtgccgctaaatgctgggacttcaccctcttctaccccagataatccgttaggctttgtatagttcaccatgtttcttattgaatatcttcgctgataagaccagtatttagctgctaattgctacgatatcattataatgctccaccttagttccgatcgtagtgggaatttcaccgttaacaggtgacaaatcggtggcatcaggctatttttgacgatgacgaactaattgccggagataccagcataatggcggacaagtttcacattttgcttctgaacggcccgaatttaaatctgcttggctctcgcgagccagaaaagtatggttacaccacgctggcagagattgttaacgggttggagacacaggctcagaatttgggtgttgcgttatcccatctgcaatccaatgcagaacatgcgctgatagacagaattcatcaggcacggggcaacactgatttcatcctgattaacccggcggcgtttacgcataccagtgtcgctttacgcgatgctctgttaggcgttcagatcccgtttatcgagatccatctgtctaacgtgcatgctcgggagcctttccgtcaccattcatatctctccgatattgcggttggcgtgatctgcggactcggcgcagacggctacaactttgctttacaggcagcggtcaatcgcttgtcaaaatccaattaattgcaacgcaaaagagtacggaatcacactcatggatattcgtaaaatcaagaaactgatcgaactggtagaagaatctggcatttccgagctggagatttcagaaggtgaagaatcagtacgtatcagtcgtgctacagccgcaccaagctacccaatgatgcaacagccttatgcttttgccgcgccacagcagccagcattggctaacgctgtagcaccggcaccggctgctgaagccgctgcacccgcagccatcagtggtcacatcgtgcgctccccaatggtcggtactttctaccgcaccccgagcccagatgctaaagccttcatcgaagtaggtcagaaagtttctgctggtgataccctttgcatcgttgaagcgatgaaaatgatgaaccaaatcgaggcagacaaatccggtactatcaaggccattctggtcgagaacggtcaaccggttgaattcgacgagcctcttgtcgtcatcgaataacgaggcgttccatgcttgataaaatcgttatcgctaaccgcggtgagatcgcgctacgtattctgcgagcttgtaaagagctgggcatcaaaaccgtagccgttcactcctctgcggatcgcgatctgaaacacgttctgttggctgacgaaaccgtgtgtatcggtccggcagcgtcagtcaaaagctatctgaacattcctgcaatcatttcagcagcagaaatcaccggcgcggtggctattcaccctggttatggtttcctgtccgaaaacgcagactttgccgagcaggtagagcgttcaggtttcatctttatcggtcctcgcgccgaaaccattcgtctgatgggcgacaaggtttccgcaatcagcgccatgaagaaagccggtgtaccttgtgtgccgggttctgacggcccgctgagcgacgacaccacgcaaaacaaagctttcgccaaacgcatcggttatccggtgatcatcaaggcgtccggcggcggcggcggtcgtggtatgcgcgtagtgcgcaacgacaaagatctggaagaatccattaacatgactcgtgcggaagccaaagcggctttcaacaacgacatggtttacatggaaaaataccttgagaatccgcgccatatcgaaattcagattttggcagacggtcaaggtaacgcgatttatctggctgaacgcgactgctctatgcagcgtcgtcaccagaaagtggttgaagaagcgccagcaccgggcatcaccagcgaaatgcgtcgttatatcggcgaacgctgtgcaaaagcctgtgtggaaatcggctaccgcggcgcaggtacttttgagttcctgtatgaaaacggcgagttctatttcatcgaaatgaacacccgtattcaggttgagcatccggttaccgaaatgattaccggcgtcgatttgatcaaagaacagctacgcatcgcggcaggccagcctctctccattaaacaggatgaagtgaaggttcacggccatgcggtcgagtgtcgtatcaacgctgaagatccaaataccttcctgccaagtccgggtaaaattacccgtttccatgcgccgggtggctttggtgttcgttgggaatctcatatctacgctggctataccgtgcctccgtactacgattccatgatcggcaaactgatcacttacggtgaaaaccgtgacgtggcaatttcccgcatgaaaaatgctctggcagagctgatcatcgatggcatcaaaaccaacgttgaactgcaacagcgcattatgaatgacgaaaacttccagcacggtggcaccaatatccactatctggagaaaaaacttgggttgcaagaaacctgattttatttcgcctgaaaatcaaggccggttaataccggccttttttattttctgatcaaacagggctaggcaaacgccgcgcttgccgtaaaatcccctacccttgttaaactcagaaccgtcaatacccacgggagaatgaatggacacgagatttgttcaagcccacaaagaagcgcgctgggcctttggtctgactctggcctatctggcaggctggttattgtgcgcctattttcctggcgatgtgccggggatgaccgggttacccgcctggtttgaaatggcctgtctggccctgccactgctatttattgtgctgtgctggctgatggttcgctttatattccgcgatattccgctggaggacagtgatgcaaactgatgtcgtcctgccattagttgcctatctggcattggtttttggcctttctatttacgcatacacccggcgacagaccggtaatttcctcaacgaatacttcatcggcaaccgttcgatgggagggttcgtattggcgatgactctgaccgccacctatattagcgccagttcatttatcggcgggccgggagctgcttataaatacggcctcggctgggtattactggcgatgattcagttgccagcggtgtggctgtcgctaggcgtactgggtaagaagtttgcgattctggcgcgtcgttataacgccgtaactctgaatgacatgctgtacgcacgctatcaaagtcgtttactggtgtggctggccagcctgagcctgttagtcgcctttgtcggtgccatgacggtgcagtttatcggcggagcgcgtttactggaaaccgctgcgggtattccctacgatactgggctgctgatctttggcgttagtatcgcgctctatacctccttcggaggtttccgcgccagcgtattgaatgatgcgctgcaagggctggtgatgctggtaggaaccattttactgctggttgcggtggttcacgccgccggcggcctgcataaggcggtcgatacgctacaacacatcgatccggcgctggtttccccgcaaggtggcgacggtatcctcgatttgccgtttatggcgtcattctggattctggtgtgcttcggcgtcattggcctgccacatacagcagtacgttgcatttcctatcgagatagcaaagcggttcaccgtggcattattctgggcactattgtggtggcgattttgatgtttggtatgcatttggctggcgcattgggccgggcgatcctgccagatctgaaaattccggatcaggttattcctacgctaatgatcactgtgctaccgccgttcgccgcagggatcttcctcgccgcgcctatggcggccattatgtcgaccatcaatgctcagctattgcagtcttccgcgactatcgtcaaagatttgtacctgaatttccgtccggaacagatcaaaaacgagcgtaagctggctcgtatttccagcatggccacgctggttctcggcctgctgctattgctggcagcctggcgtccgccggaaatgattatctggctgaatttactagcctttggcggtctggaagcggtattcctctggccgctggttctggggctgtattgggaacgcgctaacgctcacggtgctcttagctcaatgatcgtcggtgcggtatgctatacgctacttgccagtttcgacattaagatcgccggattgcacccgatcgtgccgtcacttgtgctgaacttgctggcgttttatatcggtaaccggtttggcgacagagcgcgggcgcgacagcctgtcgtcgccaacgctgaataaatcgctatttaacggtattatttaccgaaaccttattgacaaaaaccggtccaaaaacgcaagttgcggagcggttttagaagagaaaagctatgccttggatccaattaaagttaaacacttccggtaatcaggccgaatccctcggggacgcgctggttgagagtggcgcagtatccgtcaccttccaggatacccacgataatccggtatttgagccgctgccgggggaaacccgtctgtggggcgatactgatgtgattggcctgtacgatgccgaaaccgatatggctgaagtgatcgctgtgctggaatacaacccgcagttaggcaaaggcttcgcccacaaaattgaacaactggaagacaaagattgggaacgtgagtggatggataatttccacccaatgcgctttggcgagcgcctgtggatttgcccaagctggcgcgatgtgccagatccaaccgccgttaacgtgatgctcgatcccggtttggccttcggtaccggtactcatcccaccacctctctttgtctacaatggctagacgggctggatttggaaggtaaaactatcatcgatttcggctgtggctccggcattctggccattgcggctctgaagctgggtgccagccgcgctatcggcattgatatcgatccgcaggccattcaggccagccgcgataatgcgcagcgtaatggcgtttcagagcgtctggaactgtatctgccgaaagaccagccgacggatctgtctgccgacgtcgttgtcgccaatattctggctggcccactgcgcgaactggctccgttgattagcgtgctgccgaaagtcggcggtcatttgggtctgtctggcgtactggcgactcaggctgccagcgttgctcaggcttatgaagataaattcgcgctggacccagtggcagagaaagaagaatggtgccgcattaccggcgtcagaaaataatccccacgctatttatccccgcttacggcctcactacgccgctggcggggttatttcccccgtcgtcatacccaagcccgccttttacacttaatcgctgtgtgagctttctgctgcgttaacatgtctttgttgcagctgatagcgacgcgtcatgttttttcctcaaagtgagagctttctcacaggatttatggggttattactgtggtttaacgcagttttgcttactaaatcagcagtatcgatcggtgttaaaagaagtttccagtcaataatcagggtgtttagcagaaaatattgtcgtacataaaacaaccaataatttataactgcatgtttaatatgaataaataattattattacaagattagctggctatttattgctatttttaagccaattggtcaaagtttggcctttcatctgaacgtaaaaatgcgtaatatacgcgcccttgcggacacagtatggtcattctttgtctatgcacattggacacttccagcttaaaaattgcctgattgccgccccgatggccggtataacagaccgacccttcagagccttatgtcatgcgatgggggctgggatggctgtatctgaaatgctctcctccaatccggaggtgtggcggacggataagtcgcgtctacgcatggtccatagcgatgagcccggtattcgtaccgtgcagatagccggttgcgatccggatgatatggcagcggccgccagaattaatgtggcgggcggcgctcagatcattgacatcaatatggggtgcccggccaagaaagtgaaccgtaagctggcaggatctgcattgttgcagtatcccgatctggttaaacagatcctctccgcagtcgttaatgcggtagatgtgcctgtcacgctgaaaattcggactggttgggctccggaacaccgtaactgtatagagattgcccaattggccgaaagttgtggtatacaagccctgacaattcatggccgaacccgtgcttgcctgtttaatggtgaagcggagtacgacagcattcgggcagttaagcagagtgtttccattccgattatcgcgaatggcgacataactgacccgcataaagccagagcggtacttgattacactggggctgacgccctgatgataggccgtgccgctcaggggagaccctggatcttccgggaaatccagcattatctggacactggggaactgctgccaccgatgccacttggcgaagtgcagcgtttgttaaacgggcatatacgggaattgcacgacttttatggtccaggcaagggattccgtattgcacgtaagcacgtatcctggtatctccaggagcacgccccaaacgaccagtttcggcgcacattcaacgccattgaggatgccagcgaacagctggaggcgttggaggcatatttcgaaaatcttgcgtaaacagaaaaaagagctgacagaactatgttcgaacaacgcgtaaattctgacgtactgaccgttgcaaccgtaaactcacaagatcaggtgactcaaaagcctctgcgtgactcggttaaacaagcactgaagaactattttgctcaactgaatggtcaagatgtaagtgacctgtatgagttggtactggctgaagttgaacagccattgttggacatggtgatgcaatacacccgtggcaaccaaacccgtgctgccctgatgatgggcatcaaccgcggtacgctgcgtaaaaaattaaaaaaatacggcatgaactgatactagtcagttaggttgttgtttaaaaaggcgtactccacacggagaacgccttttttattgcctgtaaactgcccgctgttctgagataaggagaacaacctcgcaaaaaacaaatgattccttcactaattaaatggtcaatcatacttatacaatcacaacccttcgtagtaaggtattttttagaaaaagttatcgcaatgttctgattttattatttaaattggtaaatatcatgtattctttgtcgtccccgcccatcgggcaacctgatagtgctgtatcaatcttatcgattcactcaatcacttttcagtcattcaataagtttctggttattaacgagctatattaattacagcccaaattctgcctatagcgcggactatcgaatataaggtagatactataaataataacgccggtggttggactattaatgaatcgctgaaggcctgtgaattacctgcaaatatcaaaacaggttttgctggcgtgactaaaaacctggttggagcggaatgcgttccggtattatatgctgccaagcagagaggcaacggtaccaaccctacgctgatttgtgtgcaacccctttcagaaaaaggcacgagcaaacatcttgtgacatttatccttcaggaatccttggataaaaagtcagcagcgccctatcacgcctatcgttaaataattcagtttattgatggagttaaataatggagttaaataatgcaggtaaataacagagataaataatagagataaataatagagataaatagtcatttttatattttcaatttgattaccgcaactaaatacacccgcccctcgacaattatttttgtcggaatggctgcttattttatttattaatgaaaaatcactgcaacgacagtctcttagcaaatcagacaacgtcatcctaaatatcctgcaatgggtagaacagaacgttatttccccttgagtttgattaattaatctctttatttcactcaggagatatatgttatacttgcccaaagagccgcttctcgcctgccaactgcctccgattgagacccgaaacaccgcgcgatccccgcttttaatgtaaagattctgtcaattattggtttgatgaaaacgataagcgacaactggtgtcttaaataatgtaccgctaacgagttatttccttatgcgttacacattcgctcctaacgcataatgattgagttaacatgataaaaccccaaaagttccagctttcgctgcttcatcctcgctattggctaacctggtttggtctcggcgtcctatttttactggttcagttaccttacccactgctgcaaaagctcggcgtgtggctgggccggacttcaatgcgttttctgaaacgccgcgtctccattgcccgccgcaatctggaactgtgtttcccggatatggataagcaagtgctggaacgcaccattgtcggcaactttgaatccctgggcatggggctgatggaaaccggaatggcctggttctggcctgattcgcgggttaaacgctggttcaccgtttcaggcctgaatcacctgaagaaagcgcaggaaggcaaccgaggcgtgctggttatcggcgtacactttatgtcgctggaactcggcggccgcgtgatgggccaatgccagccgatgatggcgatgtatcgtccgcacaacaacaaagcaatggaatttgtacagacctggggtcgtatgcgttcgaataaagcgatgttggatcgtaaagatctgcgcggcatggtacatgcattgaaaaaaggcgaagccgtctggtttgcacctgatcaggactacggcccgcgcggtagcgtatttgccccgttctttgccgtcaatcaggccgcgactaccagcggtactttcatgctggctcgtctggccaaaccggcgctgttacctttggtgctactacgcaaacccgatggcagtggttatgacctgctgattcagccagcgctagaagattatccgattgacgatgagcaagccgccgcctgttatatgaataaggtgctggaaaaagagatcttgcgtgcgccagagcaatatctatggctgcatcgccgctttaaaacccgcccagcgggtgcgccttcgctgtattagcaccatctgaatagcaaaaaaccggcggagccggttttttattgtctgaagaacgccaaatcgcggctacttcgccgttttatcttctacgcgatagtccgaaagcgatgagaacgtgcgggttgcttcatccagcacatcaatagaaccggtttcaatatcataaacccaaccgtgtaagcgcaaacgcccctgcgctgtcgccaatgccaccgacgggtgagttttaatattcgccagctgcgcaatcacgttctcacgtaccagagaattcagccgatctttgggtgaaacatgcggcaacgcggcattgaccagcttggccgaatccgcatgacgcaaccaggctgcgaccgcaggcagatgatccaaacactgacactcggcaatcgcgctcatggcaccacagtttgaatgcccgcaaattaccacatcggtaacgcccagcactgccacagcatattctaccgtcgcggaaacaccgcccggctcaggcccgtaagaaggcacaatatttccggcattacgaatgacaaacagctctcccggctcccgttgagtcagcagttccggcaccacgcggctatcagagcaagtcacaaacagcgcgccgggactctgtgtatcggccagctgtttaaatagctcagaacgctgtggaaacacttctcgttggaacttcagaaaaccgtcaataatatcttgcatcatatctctcctcgcccgttcaacgctggcccacgccagcacgctggcaagttttgtcgcttaccataataaatatcctatcagcggcgcgcctattacggtaataattccagccaacatcatgactaggctagcgactaccccttcctgttgccccatttcataagctttggccgttcctgcaccgtgggaagaggcgcccaaaccggcaccttttgctaaaccgctacgcaccgatagccgcagaaacagcaaatcgcctaccgccataccgaatacgccggtaatcaccacaaacagtgcgaccaaatcgggctgtccacccaactgtttcgccgcttccagcgcaaagggcgtggtgatagagcgcaccgccagactgcgctgcacctcttccgagagcgtcagcagcttcgctagccataccgaactggctaccgcaacggtaatcgcagttatcactcctgcgctgagagaaagccagtggcgacgaataatcgacagattctcatacaccggtaccgcaaaggcgatagtggctggaccaagtagccataacaaccaatgggtttctccaatataatcctgataggaaatatgagtaaccaccagcaataacaccaaaatcatgggtgtcagcacgagtggcatgagcagcaaggaacagcgacgaagatagagtttcttattggcaaaataaagccccagcgtcgccaaaaagcacaggatactgataataaagtcattcatgatgagctgatttacgccgctgtagccagatttcaaaccgatagactcgatcgaccactaacccggtagcggccagtgtcagcatggtactcacggcgataacggcaaaaatcttccaaccctcaaccattaatagctgggaataattcaccacggctaccaccgccggaacaaagaacagcagcatttctgccaataaccagcgagaaccggctttaacccagcccatcggcataatgcgtaatacgatcagcgtcagtagcaacaacatacctacgatattggctggcagtggcaaatggaaaacccgaactaattgatcggcaatcacaaagagcccaacgtataacgccacttgaaccggcacctgtatgcgttggaggaaagacggcgcaaaactgcgtaacgccaatgacatgagtgaaccccaatgggaaagattttacagcatccagtataggcgcgcggaaagcttgccaaaaatgaattaaaattatcttaatcatgccaaattggcatacttagggtgatgctcaagctaccagccaatttttggggaatacagatggatatccgtaccttacgctactttgtcgaggtcgtacgccagcagagcttcactcgcgccgcagagaagctgtttgtcactcaaccaactatcagcaaaatgctgcgcaatctggaagaagagctggaatgcagtctgttgattcgcgaaggtcgccgcctgcatttaaccgatagcggtcaggccgtttatcagcgcggtgtcgccattttggatcagtttcagcagttagaagccgagctggaagatattggttcgctgaaaaaaggccgcctgcgcctgggcataccgccgatggtcggcacccaaatggcggtattaatcagcgaatttcgccaaagttaccccggtgtagaactccgtattgccgaattcggcggcctgaccgtccagcaggcagtgctttccggcgagctggatttagcgcttaccgccctgcccgccaatgccgatttgcctctgacttcattaccattattcagccatccactgtgcgtggtggtgccgcgcacgcccttttggctgaaccgaaccaccattagtattcccgaattggcagaacagtcgatcctgatttataacgaggatttcgcgctttatcgccagttgatggacgcattctccgctaacggattttcaccgaaaattgccgttcgcagcggtcaatgggattttctggctgcgatggtgcaggccaatatcggcattgccattttgccggagcctatctgtcagcggttggataagagtacgttactgtggcttccgctggaacctttactcccttggcaactggggctgatttggcgccagggcagctatttgtcccacagcgcgcaggcgtggattgcccgttgtcgagaattctggcccaacggctcgttattaggaaaaaaacgggagagttaatgcgaggctgagtgacgggagaaacgagcggagcctgacgactccgctcattaagggaattaaccttctttttctatcagcaaggcttccagcaaatccaaatcgtgcagtagcttttgcagcgtttcgttgctaattttctgcgtcgcgcgcaaatggtaaagctcgccgcgttctgcccgtaacgcggttaaacggaagcgacgctccagattctctatcagcaaggtattttcgatttcgtctttactgccagtgcgccgccgcaaagtcccgattacccgcgaactgacctccttcagcaattgctcgtcaatattctcttccgtactggccgccagacgttcttccatcttattcaggctaacaatagccacttcggccattgcggccttggcggcgcgaatttcttcacggctgacgcttttatccccaaccacgacgccgcgtagcaacagcggcaaggcaattacccccataatcagcgagaagagaatgacaccggttgcgataaataccagttggtaacgcgatgggaacgcggtgccatcgctcagtaataacggaatggacaacacaccggccagcgtaatcgccccacgcacgccagcaaatgaggcgacccataactcacgggtggtgtactcactaaacaacagcgggcgttttttcatgactcgcttactgatgcgtttcatcagccacagccagctaaaacgcagcatcagcagcgccacatagataatggcgacgtcggcaaacaggttccaggtttgaatagttggatccagctcggcctgtagaatcgaggtttccagaatccccggcagttgcagacccaacatgataaacaccatgccgttgaagacgaattccagcatcgaccatacgctatccgcgcgcaggcgcattgccaaaggcgcattacgaatgacgccggactgactgatggtcatccccgcagcaaccgccgccagaatccccgatacgccaatatgttcagcaatcaaataagaggcaaacggcagtaatagcaggaaaacgatttgcgtcgctggatcgtcaccgctccagcggctcataatacgcagcgatttactgtacagccaggttacggccacaccggccaacagcccgccaatcgccactttcaggaactctagcgtagcgccagaaacgctgaagatcatggtgcccatcgccacggcaatagcaaacttcaacgccaccagaccagaggcatcgttcatcaaggcttcgccttccagcacgcccatgatggattttggaatgcgccctttgcccacaataccggacagcgccacggcatcggttggcgaaagcacggcagccagcgcgaaggcggcaaccagcggaatccccggaaccatccaatagatcaaatagccaacgccaacgaccgtaaccagtaccaacgccaaggccagaccgaaaatctcccgaccgtgatgaataaactcgcgggtaggcgttttccaaccgtcggcaaacagcaacggaggaataaacagcaccaggaatagctcgggatcgaaattaacgtgcaacccaaagtggggccaggcgagcaaagcaccacaaacgatttgcatcagagggagagggatttgaaacggcaacatccgggtgacaacacctgagagtgataccaccaaaatcaggatgaggattgtaaaaaagatttccatgctttccttagactcaacgcgacttaagttctgatcttacccacactcttcaaggggcggggggcctgataggtgatagtagatcacttttttcttcgcggggaaaaaacctgttactgacagcagcaaaagcataaacagcggggagtttgactaaaaatagcggtaaggagaggcgattaccgctccttaccagccagatgaaacagttaaatcagatagcccagccgccggcatagaatgccaccagcgcgatggcaataatcacggtgccgatattcagcttacgccattcgccagagaaaatacggccaatcaccagagagctgaagcccagcataatgccggtaacgatgttgcaagtcagtacgataaacaccgcacacagcaggccagacatcgcatcaacaaagtcgctgaaatccagtttggctacgttgctcaacattaataaaccgacgtacatcagagccggtgccgtagcgtagccaggaaccagataagacagcggagacaggaacagaatcagcaggaataaaataccgactaccgttgccgtcaaacctgttttgccacccgcagcggtacctgccgcagattcgatatacaccgccgccggagccgcgccgaccaaaccggcaaaaatgctgctcaccgagtcagacgtcaaagctttaccgccgttgataatctgcccgtctttatccaacagattagcctgccccgccaccgcccgaatcgtaccggtggcgtcaaacaccgccgtcatcaccagcgccagtacgcttggcaacaccacgggctgcaaagcccccataatatccagactgaaaatcagcgagtcgccgttggcatcagccagacttggcatcgcaaacagaccttggtaagtcacgcttggatcaaaaatcaagccaatgattgaaatggcgataatcaccagcagaatgccacctggcacccgcagtttctccagaccaaaaatcaccgccagacccaataacgtcatgatcaccgggaaagaggtgaaagcgcccaacgccacaggcaaaccttccagcgggtttttaatgaccagaccgacaccgttggcagcaatcagcagtaaaaacaggccaataccaatccctgtaccgtgagcgacgcccatcggcaaattacgcagaatccaggaacgaatgcccgttaccgaaataatggtgaacagtacccccatcaggaataccgcgcctaaagccacgggaatactgatgtgttgaccgagaaccagactgaacgcggtaaaagcggtcagagagatggcgcagccaatggccatcggcaagttcgcccataaacccattaacagagagccaagcccggccaccagacaggttgcgacaaatactgccgtcggcggaaaaccggctttgcctaacatggctggcacaactatgaccgagtaaaccatggccaaaaaggttgtcagaccggccagaacttcttggcgcacattggtattgcgttcgctcagtttaaaaaatgcatccaacgcgcctttcggctttataccgtcgttcgcttgaggattggtgctagacatggttatgtcccctgtgtgtcaacaaatagcctgcacgcggttccgacaaaatcgctttcattactgagcatccatcgagctatttccccgaaatagtcacgctggaaagaaaagcaaacgattagctggctgcgcgcataaccgaaaaaaagtaaggtttattcaaggcaaacgattatctagccatccatagtgactaatcaacaccagatagcgacatttaatgcattttatgacattaaatagccattctcagaaatgtgcgggggatctcatccatagaacgccatttttatgtcgttaaaattgggcaaaagcctgggtgagaataataacgaaaatgccaaacggcacgagcggggaataatctggatcaccggtttccacaaagttcggccaaagccgccaaggggaaaccggttttttatcactggctgacgaaacggctctagcgaaccagttcgaatttaccgccacgctctaccgcacgttggtatgctggccggcggtgaatccgcgccagaaaatcttgcagtttcgggtagcgggatagcccttttcctgcatcgatagcctcaatggggaaactcatctgcacatctgccgcactaaaatctttgccagcaaaccacttattggtactcaagtgctgttccagataatccagatgcgtggcgatctgcttatccaaataatttttctgcactcctttgccgattgctcccgccaccggacgcagtaaccacggcatcggcgggtgtcccagacgaccaaagatcaacttcatcactaacggcggcatcagtgaaccttcggcataatgcatccagtaacgatattgttggcggtcgtaatgatccgtcggcttgaattcaccttgagcatcatatgtttcctgcaaatactcaataatggctcccgactccgccaaagtcatatctccatcggtaatcaccggcgcttttcccagcgggtgaacctttttcaactcacgcggagccagcaggcttcccgcatcacgctgatagcgttttaggtcatagggtacttgcagctcttccagcatccataagatacgctgagagcgagaattattcagatgatgaactatgaccataagaaaactccagagtagaaaagcagagatcggaaaaactgagtatagccgaggataatcgccaacttttattaccttgctaatcagctgataaaagattgttcagccagtcggccataaaggaacgccacaggccaatattccgcttcaatgttatatcagagagcatcgctttgcggtaaacggattcgccatgagaataaataggcgttggcgatattttacttagaggaaggaagatcgataaactcttgctcaatcaggtatttcttgtcacttagcatggttagcgcgccctgaagcgttgctgatatcccaaccagatcacgccattccaccagactgtttttccagatatatttccaccctttcttgcctttgatgtaggttaactggagtagctcaatctgcaccttatctaccgaagcggctgataaataaatgcgccgacctttcagttcataaatcagtttagccctaagcccagccgacaaatccgcattaaagctggcgcaaaacgatgccagtatcccttcaagatcatctaattcctccataccgctaatcatccgcactccccttgcttaacctgcatgattgaaagcctgtttgcatcctatccttgatgttattgaactcccggtcttcatcggtcctatcaagatagggatcctgaatacacccgagatgatgttggcctgttgttatctctatagtggttatgtcagccagagccgcctgagggtgttatcattgctcaaaacttatcatgacatccagcccgataaatggagtccagcgaccaatgactgacgattttaaccgcaccgccaaggtattatccgtatttgactttgacggcacgctgacacaccacgatagttttatcccttttttgcagtttgctttcggcaaaagatactttgtccgtcgtctggtaaaactggtattacctaccattaagtgtcttcgacgagaacttacgcgggatgagctgaaagaagtgctgatcaaaacctacctgaccgaggttgaggatacatgggtccggcaaaaagccgaagagttctgttctctttactggagcaaattaatgcgccctgccgggctgctggcagtagccacggaagtgaactccggagccgaagtcacgctatgttccgcttcaccggcaatggtactgcaaccttttgccgacaaactcggcgttaaacttatcggtactcagcttgaggtaaaagacggtttactgaccgggcgcatcagcggccataactgtcgctgcgcgcagaagatcaaacgtctggaaagtgtgtatggaaatctggctgattatcacctgagagcctggggagacacccgaggcgattacgagctgctggccgccgctcaggagccgcactggcggcatttccatccagtctggtctaaaaagaaatctcgactggcgaaattacgccagaccagcttaaacccgccgcatcagtaatagctcatacctatcagataatgcgtaatgcgccccgactcaggggcgcccaaaattatagaatgcgctcagcaacagcggcatcgtgccagtccttaaactcctctaggagcaggtcataaagccggtcttcttttaacgtggcaaagttatcgatagcaaagaaatgggtgttatccatccgacgctcagtaaagctatccaacttttccagaattccgtaatttgtcccccccagcccaacgaacttccaaaaaatcgggtaattggccgagcgtcgtatggcattcttgatttctcgggttttactgatcccaccgtcagtaataaaaaccacatacaccggcagctcactgcttttaaagaaatcgacaatttcttccattaccggtggctcattgttgacgccgcccaatccaggcaaattctcccacgtcgtacgtttagatgtattttgaatagaatcaatataaccatcgagattatctagcgtgacatccggatatttacggtgccgctcagcaaatccccaaacatccatcgagccatcgtcgtcaaactgtacggctaataccgcgatacgatctagcactgcctggacatttcctcgattaaattgccccttcatcgaacctgatgcatccagcacaaaagccacttttgcttgcactgattgtagtttgtatttattcaggctaacgacggcattttttgccagattgaccaaacgaggcgctttttgttcgagctttttctccaggcttactgttggcgttgaggttgaggttgaggttgaacgagctggcggtggtgtcgttgcgatatcaacgccaaaattgatcgccagcggttccagcccaccgttgaatccttgcccaagtgctcgcagcttccaatgtccgctatatctgtatatctccgccacgatcagtgctttttcgctacgcccggaggtttctacagtaaataaagctacattgtcagtctctgtctcagcggaaaaatgtagttgttgaaggctggcaatggagtcctgcccatcaataaccaatgtaatggcgaccttgctgatttcggcatcaatcttggaaagatccaacgtgattacgctgttttgcgctgcactttgtaaagtcagactcccatccgccgctaccggatgattgaaaaagaaaaaatcatcatctcctctcacttttccgctggcggtcaataaaaaggctgaggtatcaacctcgcttcggaaagaaggagttgttgggtaagaaagtgtcagtttgagtgagttctgagttaacgcgatgttctggccagcctgaagatgcatatctaaagtccttggttccatatcaaactacagtggtcattttcctattatttacgggttttactcataaaaaaccccggtaatcaccggggttttttatcactgcggaaattagacgtttacgccgtgctgggaggccagcgcagataaaccgccagcaaaaccctggcctaccgctttgaatttccactcggcaccgtgacggtacagttcgccgaagaccatcgccgtttcggtagaagcgtcttcagacaaatcgaaacgagcaatttcagcgccagaatcgttgttgtaaacacgcatgaagctgttgctcaccataccaaagttttgtttacgaccttcggcatcgtaaatagtgacggcaaagaccagtttcttcacgtcagccggaactttggccagatcgattttaacctgctcatcatcgccgtcgccttcaccggtgcggttgtcgccctgatgttcaacggaagcacaagggctgagtttgttattgaagaaaatgaagtgagcgtcagacagcactttaccgtcttcaccgaccataaatacggatgcatccagatcgaatccctgaccgtcggtcacacgagaatcccaacccaggccaaccatagcgatgttcatggtgggtgcttctttagtcagggatacgttgccgcctttaacgagagaaactgccattttaaagctcctgcttataattggattattgggcaacgacttgctgcccaagtattaaacggtggcgattagaacgcgttaataccgtactgtgcgcagacggaagccagaccgccagcgtaaccctgacctactgcacggaatttccactctgcgccgtgacggtacagttcgccgaacagcatagcggtttcggtggaagcatcttcggttagatcgtaacgagcaacttgagtctggttgtcatcattgaccaaacggataaatgcgccagaaacctgaccaaagttctgacggcgagtttgtgcgtcatgaatagtgactacgaagacaattttgtctacgtcagctggaatatgatccagcttgattttcagggattcatcatcgccatcgccttcaccggtacggttatcaccggtgtgaaccaccgaaccatcggcagatttcaggttgttatagaaaatgaagtctgcgtcgccgcgtacttttccgtttgcagccagcagaaatgctgatgcatcaaggtcgaaatcctgaccatcggtagaacgtgcatcccaacccagtccaatcaggacattcttcatggttggagccgctttgctcagggagacattaccgcctttagataaagaaacgctcatgtgagtaacctcttgagttgatatttttcgaattcaaattcaggaatcggggatcagttccccttttcttcctcagggtccggtttgccagggaacattacgctggcaatgatacctaccgccagcacacccagaaccacaaacagactcgtggtggctgaaatgttgtaaccgtggtgccaaatgtgatctgttgcattcaaacccagtttcgcggcgatgaagaacagcaacgcaacaacggccttttcgaggtgaaccagatattgtttcaatgcttccaaaacaaaatacagcgtacgcagacccaaaatagcgaacatcatggcgctgtaaacaatcagaggctcgcggctgacggcaataattgccggtacggaatcgaaggcaaacatcacgtcagacagctcgactaccgcaacacacagcatcagcggggttgcgtacagtgcggctttggttccacgccctacggtaacgtcctgattttccggcttcgccagttcttcatcaacttctttctgattcagcaagaaagcatgacctttcaacttcggccaaatcgggaagaagcgttttaccatgcgataagccagatgctgcgaataatcttcaatttcatcgctttcgccgccgcttctcagcatcatcaccgctgtccaggccacaatcagcgcaaacacgatttcaacataaggcccaaggctcaatagcccggtaccgatagcgacgaaaatgccacggaagaagattgccccgataatcccccaatagagaacccggtgacggtaacggtccggcaccgagaaccaggagaagatcgccatcatgacgaacaggttatcgaccgagaggactttctccaacgcataacccgtaacgaacaggctggcaacttccgcgccgtgatgaagatataggaagccggcaaacaccatcgccacaaagatccagaaaatagaccataaagcggcgcttttcagcgaaataggcttgtcatggcggtgcatgaacaggtcgataaaaatggctcccacagacaaagcaataaagacaatgactgtttcagttgggaagccgatatgcgtggataccatatataacccttaccaaatacttatattcagaggccgaattcagcaggctcaaagcccagtgcgacggcgatttcacgaactgcctgttgttcattctggtcaaagtcaccgtcacttttcgcgacggcaatcccgactcgaatcgccaactgagcggcttcaggctgatctttcagagcaagaatgtgcttcatggtttcccctttgccaatttcgagatcgaaatcgaagctggaaaccagtttgttaaagaattcaataacctcagaggtatcaaacacacttaactcatcggatgcgcgcagaaaaccaatcatcttctgtttttcttccgcgctaacgccgtcgctggaaaccgcaatacgtgcacacacggccacggtaccttgcatgaattttttatttttgaagcgactaacctgcttagtcagctccgcacgacccgtattgaatgcgcctttaactttgttgaaaaaactcattctgtattccttattattgtctgaaattactttgaacccgctttccaacggaatccccagccaagcgctttatccatatcgctgtggtctttaaagaactggttgatacgttcaactttgatcgttccctgctcgttgaccaaccgggcaatggcacacatgttgcggctgtttttcccctcggtcatacgcgtttctatcggcggttgatctggaatatggatagtgacgacgccgtcggtattatcccagctcgcgacaccttcgtagataaaggcgaaaaccaatacctgacgaatattcttccattcccgaccgttgatatgcagccattcgccctctgatacatccccggtacgatcgtcgccctgcaattgcacgaaaggttcctgatggtacgaaccaaagccgttccccaaagcctgaaccaccgacttatggccatcatccaactcgacgaaagcgcctaaatccagatcaacacctttcttcgcgctaaacatgctgcgcaggccggaggaagagctgccgcgatgccagttcaggttaatgcggatttcgccaaagttgtcacgcttcgcgaggcttatcgctggtttatctttggtgagggaaactttgctcaggttgatcttagccggagcgggcgtgggtgctggagccggaatcggcgcaggtgcaggtgcaggagtatccgcaatatcgacgccaaaatgctcagccaatggcttaagaccgccgttgaagccctgcgcgatgaagcggaatttccattcgccgttacggcgatacagttcgcccagaatcaaagcggcttcctgacggccagtcagttctacgttgccgcagatcagcacgtcgtttccatcctcaacctgcaccgacaaacgttgcagaccagaaacggtctgattgccatcgcaggtcaccgtaaacgccactttctcaacgtctgaacgcaatcgcgtgacatccacggtaaacagagtgtcgttgccttgagcaaccaaactaacggtgttgtcgttattaacaggctgaccgtaaaacaccatatcggcgtcaccctgcacttttccgttggcaaacagccgaaatgcagaggcatcgacgggtgcgccggataacactcttaccgtcaatgacttagaaggtacgggggcattgccccctggagtcatattcattagcgcaccacggtagcaacaatatccgaatgcatatcgtcaatagtccgaccgcggcaggcgtgaccatgagcggtaaagtcccattgcccgttgttacggcgcagtgacgcaataacaataccggtatgagccccctggtcggttagctggtaacgagccatttctttattatttccccgatccacgacgcggcagaatgcgttatctacgtcattaaacgtctggccgcgaaagctgttaacggtgaacgcgaggtattcaacctgatgtggtaagcggttcaaatccacgcgaatgacttcgtcatcgccgtcgccttcaccagtcagattgtcgccggtatgaacaacggagccgcaagacgactctaatttacggaaccagatagtatcgatggtattaccggatttatccattaatacacaacccgcatcaagatcaatggaattatttccgccaaaaaggctgcctaataacccttttttcttaattggatcccagcctaaaccaaattgaagttggctaagagaagaagattgtttactcagtgagaccgtctggtttttgcttaatgaaaccatattttatattccttcaacaggatatgaaaaataaccacattttttacattaaagtcgtgaatccaaaaatcatatcatgatgaagttcttgaacaagttaatttttagtcattatcgttaacaaatcatttatttgaatgatatataagatattttatttttatacccttagcggaataagcttttttgccatctaaaatcttttcatatctttacattataaacacaaaaaatataagtcataatatgattgacatacaaaaataacgtccatagactctcggctatttaattcgcctgtcggccctgcgtggaaatagatatcaatggcacataaaatttggcttatggaaggtttgtcctcccaacgggatattattcagggcattaatactttcgctaaaaataaagatacggacattttcgttattgcttcccaccgtaatgaacgtaatgaaattctgtcgcaggcggacttggcagtactggagccaaaagaagaagaacagcgcctttcttttattctctcactggttaaaagacttgatattcaggccatccataccgggcgcaattccctatggttcgaatcccatcgcaacgaaattgaatgttccggcgtaaaactcactaccggagcccatagcgtggcgcggcttgaactggcggatgacaaagtgagttttgcccagtttatggagcagcaaaacctgccggtcgtgccttctattcgcgtggaatcactgtccgaattattccatttcatcacccactctccctttggtttaaaacctttgtgcgtaaaaccggtaaaagggatttatggcatgggattctggcgcttcgatgacaaggtttcggctatggcggcgtttacgcatccggaaaaccgcagggtgaatccgcacttgtatcttcgcgccctcgaagaatcggatagttttgaaccgctggtgttgatgccctatctgcctggcccggagtactccgttgatatgttggttgagcgaggaaaagtgctggcggcggtggctcgtcgtaaagaaggtgctcttcagtctctggaaaacgcaggggaagcttacgagctggggagagcctgtgccgaggccatgcaggctgacggactggtcaacgtccaaacccgccacaatgacagcggcaaacccgagttacttgaaatcaatatgcgcccttccggcggcatcggctacacgcgattcagcggcgtcaacctgccgggtttgtttgccctgcgccaactgggattaatgagccagcaagaagtgatggacgaactccgtagcgcattcacccccgctatcgttcgatccattaccgacgttgtgcgttatagcccaaccttgaccaacctactcccgcaggaatagtcaccatgaataatcactctggccttcagatataccgcagagagctttcctgcggcactctgagtgtgacgccaaccggaggcatcaccaccttcgacgacctgttcgaaatagcagaaaggcgtaatcctaaacgggcatttctttttgtcagcaaagtgcttggcagacatataccggtttcgccgacggtaatgcgttcggtttaccgtcagttaggggaacaaattccctccctgacgacagggccggtgctgtttattggcatggctgaaaccgccgttggcctaggagccggagtgtttgatgaaattcgacaccgtgtggccgagccggtctatctcacctcaacccggcatccggtagagggcgagttactgtgtgaattcaaagagaaccatagccacgccaccgatcatttgatttacctgccgcaagacgccgagctgcgccgccgggtattacaagccaaaaccgtggttttaatcgacgatgaagccaccaccggaaatacctttattaacctgctcgcggcattaagagagactgcgggtctacaccatattcagcaggtgattacggtcacactgaccgattggagcggtagttccatcgcggaacgctgcccgctgccggtgcaaaccgtttccttggcgcagggaaactggcactgggagaaaaatcctgacgcacctgtgccaatcatgccttctgtgaatatcaccgcttccggcaacgtcccgataaccggtaaacaaagctggggacggatcggaatgaatgagcctgagaatgatcttgggctatccattcagacgacggaaggagaaaagctattggtattgggaagcagcgaatttgtctgggaacccttcttactggcggagcggctggaaaaacagggagcagaggtcaaatacagttcaacgacccgctcaccgattgccaccagcttcgcgatcgaatcggccattgccttcaccgataattacggattaggcatccctaactttgtctataacgtggctcatcagcgttttgaccgaatcttgctatgtatcgaaacgccgacagaaagcgtcgatcccgcactgctggaggcgctgaaaaaagtggctccctccgttgaggttatttcctatgaataagccggttattttttccgatctggatgacaccctgtttcaaacgcgccgcaagatggtgaatgagctggatttgcagccttaccgcaccggtgccttggatcgcagcctggaaccgcgcagttttatgacggaagaacagaccatgctggtggattggatgctagagcatgccgagctgattcccgtcaccgcgcgaggaaccgaggaaatcgctcgggtcactattccgtttcgttcatgggccgtgaccactcatggtgccgtgattctcgatcctcaaggccagccggacgaaggctggaaaacgcagatgctggcggctttacagccttacgcagaaaagctagtcactatgcagcgtcaaatgaccgaactcatggaagccagaaatatcaacggctgggcgcggctcaattacgaatataaccatacgccgatctatctggtgatgaagcatcgggacagcaccaaactggatgagctaaacgcgattggcgatgaaattgaacagattttctcaaccgacggtttctatattcatcgcaacagcaacaatattgcctggctaccggagccggtagagaaagggttggcggtcacttatttactgaacaaactgcgggaggaacggggcgtatttccggttatcgggctcggtgacagcctgagtgaccaccgtttcatgaaactctgcacctggtatggattgcctcgccagagccagtttgctgaaagcatcgccagcaaaatctttggagaaaaataatatgcatgatttcatccctttttccggttcctatctaccggaagacgttcatttcctgctgaaaccggtcgaaatcgaaatgacaccggtggaacaaaaagaacggttgattcagtctggcgcacgccactattcggaaatgctgagtcaggaaccggagccaacctcttggcacttagatttattcacccgcgctctcgataacggcgcagatcgtcttgccaaagaagtggtgatgctggctaaggccttgattcaacgtttcggcgatacgccgattgtattaaccagcctggtgcgggcaggtgtccctctgggcgttatgctccaccaaacgctgcgggcaatgggaaaggaatctcatcattacggcattagtattatccgcgaccgcggtattgataccgttgcgttagattggattgaagctcgccacggtaccgaaggcattgtttttattgatggttggacggggaaaggagcgattaccggcgagttagtgcgttcgctaaaagatcggccaggctatccagaacagcctcgtttagtggtgctggccgatccctgcggatgttcgtggcttgccgccagcgacgacgattggttgattcctttcggcatcatgggcgcaccggtttccggcttaatctctcgctcgatctggtcggcagaagggctgcacggctgcgttcaatgcgatcacctcagccaatatgaatgtagccgtaagctggtgaataccgtagcggcatctcgccagaccttagatcttgccgccatccccgccagcgattgggattctcagcaaaaaacctatctaaagcagcgcagcgcacaagttatcagtgcgctggcagaaaaatatcagatttccagcgtcaaccgtattaagcccggcattgccgaagccacgcgcgctgtattacgtcgtgtgcctgatcatgttctggtgcgctccgtcaatgaccctgatgtcgctttgctggtttatctcgcccgcgagaaaggaataaccattaccgaagtcggtgacgagattggtcaataccgcgcagtcacaatcattaaaaaggtactctgatgaacaaacggctctccccttggcatttgggcgcgacattgtatatgcctgctacccgcacagacattgccgaggccatcttacataacaaaattagtgggttacgctcgctggttatctgtctggaagatgcggtaaacgaagctgatattcccacggctttaatcaatttacgtgagctgctagcggttctcgctcaggccaaggctactgatggcaatagccattggccgctggttttcattcgcccaaggcatattgaaatggggcaatggctaacggaaagtctggatctcagcccgatcgatgggttggtattgcctaaattcactttggcgtcattgcccgagtggtgggcaatcatacgagatagccatttatgcatgatgcccacgctcgaaaccgaagaggttttcgacgtcgttcaaatgcgccagcttgccagtgagctacaagctcatccttgccatcagcgtattattgctttgcgtattgggggcaacgatctgatgaatgtgatttctttgcgacgaacgcgtgatttcactttgtacgacggccctatgggttatgtgattaagatgctggtggccgttttttcctcgcgggattttgccctaacagcgccggtctgcgaacacattgatgaccatcaggtgatgaataaagagctggctcttgatatggctcacggtctggttgggaaaacagccattcatcctaatcaaatcagtaagatagaacaggccttaatggtatcacccacggattatgccgatgcattacgtatcctgaactcaacccaggccgtatttaaatctcagggatcaatgtgtgaacccgcaacccaccgtcgctgggcctccggtatcctcgctcgcgctcaggtttatggtattagtgcggaaccggggcaagacggcgtacgtctcatgaccgtgactcagaacagctgaagggaacagcatactgatttatcttaaatttaggatcttcctgatattatacacgccgcaaagatcgaaaataccgagttggttggcctcctgtggcacaaaaaaacaggggaaaccatcttggctcgaaacaggattatctgttgaggctggccggagtcgtcatttatgcactactctttgaagcggtgaacatctcaggattaaccaaatgcatcagcaagataacgggaaaccatctggttatcaggaagatgtccaccgtctttatcttcccggcaatagaattcttgaccatgaatgcaggcggtaactaactatgcaactcagcacaaaacaggctcgaatcttcacactggcaaatattctgggttcgggaaaaccagtctctgccattcgaattatttcgtcccttgattgttcagagcctacgctgacccgcgcgctaaaagaactgcgtgaatcctattcagctgaaataaagtacagcaaagccactcattcttatcagctggttagccccgggaatctggataaaaaagccttacgtagtatggccaaagtactaaccgcccacgcggagtcaaaaaacaacgaggtggttagtcgagtgtttcttgataaggataaaaagcgagcggtgtcgctttcgctcaaaggatctatcttacgtaaaatagataaactgtcccgattgatcgaatccacccgtagcgaagccgtagaaatgcttgccaataactgcattgatgatttgatccgtcatctccaaaccgccaaaaaagagaaataattgccggtttctcaaaaagaggatgaattagtctttgaaggccaattcatctccccggtacgcctgtaatctgcccgtaacctctagcgccaaaaccaagactctaaaaaaagtgaaagcgtattgcggcatttcagtcaaagcccgtatccgattgcaactgccagaaacgaaaaaacccagcgattacgctgggctttgatgttttatctgtgtttagatgacgccgataagaacccgaggatcagaacgggatatcgtcatcaaaatccattggtggctcgttgccgccctgctgctgtggcgctggagcagactgcgcctgacgtggagcctggccgccgctgaactgattgccaccctgaggttgctgaggctgaccccaaccgccctgtgcgccatcgttggaaccaccctgcgcgccgccagcaggagcaccgccgccttgacgaccacccagcatttgcatggtgccgccaacgttaacaaccacttccgtggtgtaacgttcctggccgctttgatcctgccatttgcgagtttgcagtgcgccttcgatataaacctgtgaacctttacgcagatattcaccagccacttctgccagcttgccgaacagcactacgcgatgccactcggttttctctttctgctcgccggtttgcttgtcacgccagctttcggaggtggccagtgtgatgttggcaactgccccaccgttcggcatgtaacggacttccgggtcttggcccaaattcccgaccaaaatcactttgtttacgcctctgctggccatgtgaactctcctgatgaagtaaatttgtacagtataaacgagtaagtttaacacgctagagcctaaacggcactgccgatcgttactgcgggacacattccagtttagcaaaacaatcagcctgaattgcagccatatactggatattcattcaggtttttttgtgtcataattatccgtttcgtactggccgtgtcctttttctggcgttgcaaagtgcattttttacattaggctgcgcaataaaggacacggtgagaggctcagtttaatccgggaaatgtttgtatggataatatcgaagttcggggcgctcgcacccataatctcaagaatatcaacctgattatcccgcgcgacaaactgattgttgtcaccggcctgtctggctctggtaagtcttcactggcgtttgataccttatatgccgaaggccagcgccgttacgttgagtctctttccgcctatgcgcgccagtttctgtcattgatggaaaaaccggacgttgaccatatcgaaggtctgtctccggccatttctatcgaacaaaaatctacgtctcataacccgcgttccactgtcggaaccattaccgaaattcacgattacctgcgcctgctgttcgctcgtgttggggagccgcgctgtccggatcatgatgttccgctggcggcacagaccgtcagccaaatggttgataacgtgctggcacagccggaaggtcgtcgtctgatgttactggctccggtggtgcaggatcgcaaaggcgaacacaccaaaacgctggaaaacctggcgacacaaggctatatccgcgcgcgcatcgacggcgaggtttgcgatctttccgatccgccgaagctggaactacagaaaaagcacaccattgaagtggtcgtggatcgttttaaagtgcgggaagatctggctcagcgtctggcagaatcctttgaaacggcgctagagctatccggcggcaccgcgatcgtggccgatatggacgatgcaaacgccgaagaactgctgttctccgccaattttgcctgcccaatctgtggctacagcatgagcgagctggaaccgcgcctgttctcctttaacaacccggccggtgcttgcccgacctgtgatggcttaggcgtacaacaattcttcgatccggatcgcgtgctacaaaaccctgagctctcgctggctggtggtgcaattcgcggttgggatcgccgcaatttctattatttccagatgctgcgttcactggcagagcactataaatttgatattgaagccccgttcaattccctgagcgcggaaacgcaaaaagcagtgctgtacggctccggcaaagaaagcatcgaattcaaatacatgaacgatcgtggcgataccacggtacgccgtcatccgtttgaaggcgtgttacacaacatggaacgccgttataaagaaacggaatccagcgcagttcgggaagaactggcgaaatttatcagcaaccgctcctgtgcttcttgccacggtactcgcttacgtagagaagcgcgctatgtgtttgtggaaaacaccacgctgccggaaatttccgaattaagcatcggccacgctctgaccttcttccagaatatgaaactaagcggccaacgcgcccaaattgcggaaaaagtcctgaaagagatcggcgaccggctgaagtttttggtcaacgtcggtctgaactacctttccttatcgcgttccgccgatacgctatccggcggcgaagcccagcgaattcgcctagctagccagattggagccggtttagtcggggtcatgtatgtgctggatgagccgtccatcggcttgcatcagcgggacaacgagcgcctgctggaaacattgattcacctgcgcaatctgggcaataccgtcattgtggtcgagcatgacgaagatgcgattcgcgccgcagatcatgtgattgatatcggcccaggcgctggcgttcacggtgggcaagtggtggcagaaggaaccgtcgatgacattatggcggctccagaatccttaaccggccagttccttagcggaaagcgggaaattgcggttccagcgcagcgtgttcccggcgatccgagtaaggtgttgaagctaatcggcgctaccggcaacaacctgaaagacgtgaccttaactctgccggttggcctgtttagctgtattaccggcgtatccggttcgggcaaatcaacgctgattaacgacactttgtattccattgcacagcgtcaattaaacggcgctaccattaccgaaccagcaccataccgtgatattcagggtttggaacatttcgataaagtcatagatatcgatcaaagtcctattggccggactccacgttccaacccggcaacctataccggtatctttacgcctgtgcgcgaattattcgccggggttcctgaatctcgcacccgcggctataacccaggccgtttcagctttaacgtgaaaggtgggcgctgcgaagcctgccagggcgatggcgtaattaaggtggaaatgcacttcctgccagatatttacgtcccttgcgatcagtgcaaaggtaaacgctataaccgtgaaacgctggaagtgaaatacaaaggcaaaaacattcacgaagtattggaaatgaccatcgaagaagcgcgggaattctttgatgcggtacctgcgctggcgcgtaagctgcaaacccttattgacgttgggctatcctatatttgtctggggcaatcagcgacgacgctgtccggcggtgaagcgcagcgcgtgaaactgtcgcgcgagctatccaaacgtggcacagggcaaaccctgtatattcttgatgaaccgactaccggcctgcattttgccgatattcagcaattgttggcggtattacaccagctgcgcgatcagggcaataccatcgtggtaattgagcataatctggacgtgattaaaaccgcagactggattgtggatctcggcccggaagggggcagcggcggcggtgagattttagtatcaggtacaccggaaaccgttgctgagtgcgaagcttctcataccgcgcgtttcctgaagccacttttgacgcgtaaataaaagcgcaataaaacgtgctatcggggggcgagttcatcgcctcccgctctgctgactctctaagatcaagcgcgtaattcttgccgaatctgttccgataaaccttgtaataccaattgataagagccatcaatcaacgcatagaattgagaatttggcagctttccatccagaaacaccgtgttccagtgcgctttattcaagtgatcactcggcacgatctccggatgctttccacgcagttgttctgctaattccggactacttttcaatgaaatagcaggacgcccccgtacctcgctaaccatggcaaacatcacatcgccaaccttaatctgattcgcctgccactcttcatgatcgctttgttccgctcccggtttagacatacagtattcgagtaatgtcgaattattcattcgcttatctcctgttatctggccgcattcagccataaaaaccgactattccaaagacggatttcctcagaatagtagccagagagcgttagattttcgctatccggttttctgatcatgcagtaatgccgtgagatttactgtgatcgatagatagccctgacattcctgacattaatgatgacacctactatcagtatattctttaatcatcccaccacaacccacgcatcaggaataggccatcaccttctgttcctcaatagaaaagggcgatatctctatcgcccttaggtacccaacacaatcagatcagatcagcgaaaattcactcgccatctgttgagtatttaaacaaaacggatttactgcacggcggcaaacgcagcggctacctgctgaacattttggtgattaaccccagccatgcacacacggccactcgcgatcaggtaaacaccgaattcttctcgcagacgatccacctgctgttcagtaaaaccggtatagctaaacatgccgcgttgagtcagcaaataatcgaagttacgctgcggcagcgctactttcagtgccgcgaccagagtgttacgcatttccagaatacgggtgcgcatttgctcgacttcattgcgccactggctgcttaattcttcgtcattcaagaccttagccacaacctgcgcaccaaagttcggtgggctggaatagttgcgccgaacagtagctttgagctgccccaacacgcggcctgcggcttcttcgctttcacataccacggataagccgccaacacgctcgccgtacattgagaaaattttagaaaaagagttgctgactaaacacggcaaaccttccgcggccatctggcgaatggcataggcatcttcattcagaccagcaccaaaaccttgataagcaatatcgaggaatgggatcaattcccgttctttggcgatcctgatgatctgatcccactgatcgttagtcagatccgagccggtcgggttatggcagcacggatgtaacagcacaatgcttcttgccggtaactgctgcaaagtggccgacattgcctcgaaattaacggctaacttttcattatcaaagtacggataggtgttcaccttaaaacccgcaccgctgaaaattgcaatatgattttcccaggttggatcgctgacccacacttgagaatccgggaagtagtggtacaggaaatcagcccctacattcaacgcgccagacccccctacggtttgaatagtggctatacgactttgttccagcatcgggtgatcttgcccaaacagcaaatgctgaatagcagaacgataagcctgcaaaccttccatcggtaaatagaccgacgcagcctgtggctgagcgctcatttgcgcttccgctgtggctaccgcctgcaattgcgggatcacaccctgagcatcgtaataaagcccaatactcaggttaactttatgctctctggtatcggctttaaaactttccatcagcgaaaggatgggatcacctgcataggcatctacattctggaacacggcattactctccttaattaggtgcaaccaaaatagcactaacttaccctgccaggctactcaggaataaaagcgtttactgaaagtaataaataactttacctcatgttttataatgtaattattaggattctctctctaaaaaactcaggaatgagaaaataataatcagtgaggtattcggctctgactaaaacgaaaaaggcgcacatatcgctatgccgcgccttcagatgacttgctaaatcatgctcggtgaaactattcgccgatatattccattgatacgcgagacgttagtttggtaatcaattcataagcgctgataccggtagcgatagccactttttccactggcaaatccgctccccatagctccacttcatcacccactttatccctagaatccgggccgagatcgacagaaatcatatccatagaaactcgtccaacgagcggcacttcgcgaccattcacccacaccggcgtgccggacggcgcgcttcgcggatagccatcgccgtagcccatcgccactacgcctaaacgcgtatcccgcgggctgatccaggttccaccgtagccaaccggttcaccggttttatgctcgcgtaccgcaatcagactggatttcagcgtcatcaccggttgcagaccaaaatcggctccggttttctgctccatcggggaaacaccatacaatataatgcctgggcgaacccaatcgcgatgggattccggccacagcaagattccgccggacgcagcaattgactgtttacccggtttcccagtggcaaactcatcaatgcactgaatttgcagtgttgttgccgagacttccggttcatctgcgcggctaaagtggctcataatattcaccggctgaaccacattcgagcaagcgctcaggcgctgataaaacgcttcggcctcctccggacgcacacccagacgatgcattccggtatccagtttcatccagacattaatcggataaggtaaatctgcctgttctaatgcttccaattgctcaacgctgtggatggccgtttcgatatgattgaccactaataccggtaaatcctcagcggaaaagaaaccttccagcaataagataggtttcacgatcccgccggagcgcagcataagtgcctctccgatacgagcgacgccataacaatcagcatcttgtaacgtgcgcgcagtttctaacagcccgtggccataagcgtttgctttcacaacggcaatcaggcggctttgcggcgccagacgccgaacctgttgcaagttatgtcgcagagcgcggcggtcgattactgcggttgccgctttcattttctatccttaattatcaatatgtacccaagaaaattggagcttcagctcaattgaagacgaaccacccaataagctgaattaagcaagaaattcatgtaaatgaacgttaactaactaccttaaaactccagattcgctggggattattcgtcgtcgtattgcggaccggcataattatcaaagcgcgaccactgaccgttgaaggtcaaacgaaccgaaccgatcggaccattacgttgtttacccaaaatgatttctgcgatgcccttcatatcgctattttcgtgataaacctcatcgcgataaataaacatgatcaagtcggcatcctgctcaatcgagccagattcacgtaagtcggagttcaccggccgcttatcggcacgctgctccaggcttcggttaagctgagaaagcgccaccaccggtacctgtagttctttcgccaacgccttgagggagcgagaaatttccgcaatttccaaagtacggttatcagaaagcgcaggtacccgcatcaattgcaggtagtcgatcataatcatgctcaggccaccgttttcacggtaaattcgccgcgctcgcgagcgcacttccgtcggcgtcaggcccgaagagtcatcaatatacatattgcgtttttccagcagaatacccatggtgctggaaatacgcgcccaatcctcatcatccaactgaccggtacgaatgcgggtttgatcgacgcgagacagggacgcgagcatacgcatcataatctggtttccgggcatctccagactgaagataagcaccggtttgtcctgcatcattgccgcgttttcgcaaaggttcatggcgaaagtggttttacccatcgacggacgcgccgccacgatgatcaaatctgatttctgtaaacccgcggttttcttatccaaatcctgatagccggtagaaacgccggtcacgccatcatgcgggcgctgataaagttgctcaatacgcgcaacggtatcttccagaatccggtcgatacttttcggaccttcatctttattgacgcggttttccgcaatctggaataccttggattcggccagatccagtagatcttcactggtacgcccttgaggatcgtaaccggcatcagcgatctcgtttgcgaccgaaatcatttcgcgtactactgcacgttcacgaacaatatcggcataagcgccgatgttcgccgcacttggcgtattttttgacaactcggccagataagcaaaaccgccgacggactccagatcccctttctgttccaatgattcggaaagagtgatcaagtcgatcggcttgctcatttccagcaagcgttgcatttcagtaaagatccggcgatgagggcgactgaagaaatcgttgctggtaactcgttcggaaacgttgtcccagcgttcgttatccagcatcaaaccgcccaacacggactgctctgcctccagcgaatgaggcgggagtttcagcccttccatctggcggtctcgtggctctgtcgtattgttggttggtttttttcctgccatgaagagtgttctttacccggttgagaatagaaaatataacgacccagtatacgcgatgataggcagcgagtaattatatacccgttgaattagctatcgcatatcggtattagcctcatggttataaaggtggaaccgccaacatcttagctgtagggttaaatgacttccattatgaggatttcacatggccaagcgtattcagttttccacaaccggcggtcccgatgtgttgcaatatattgattttacgccaaaggatccggaagaacatgaggtgcaggtggaaaataaagccatcggcattaactatattgatacctacatccgcagcggtttatacccgccagcccagcttccaagcagcttgggaaccgaaggggcgggagttatcaaaaaggtcggttcggcggtgagcactttaaaagtaggtgatcgcgtggtgtatgcacaatcagcccttggtgcttacagtgaaattcataatgttccagccgaaaagatcgctctgttgccagataacatttcttttgagcaagcagcggcctcatttctgaaagggttgacggtgcaatatttgctacgtcaaacctacgaaatcaaaccaggagaaaccttcctgtttcacgctgccgccggtggcgtcgggctgattgcctgccaatgggcaaaagcgctgggagccagactgattggaaccgtaggctctgacgaaaaagccgagttggcaaaagcggcaggagcctgggccacaataaactacgctaaagaaaatatctcgcaacgggttatcgagctgactcaaggggaaaaagtaaaggttgtttatgattccgtcggaaaaagcacttggattgattcactcagcagcctgcaaaagcgcggcttactcgtaagtttcggtaacgcttccggcccggttaccggcgtggatttaggtattctcaaccagaaaggcggactttatgttactcggccatcgctaaattggtatgttaccaatcggcaggaacttgagcaggccagcagcgagctattctcactgattgcctgcggcgcgattaacgtcgatgtagcaccagagcagaagtttccactgagtcaagcccaacgggcgcacctgatgctggaaggcaggaaaaccaccggctccagccttctcattcctggaaactaacgattaactgacgtttattttcggcaattatcctgatttcagccagtaaaaaagggttcccgcaaaggaacccttttttataacgcattgatacagtgtaggggtacagcagtgtattccgacggaaaagagtgcggcttatgccactattgttattcccggcgaagatgaaaatattgatacaagaaactatcgattcgcatcctagcagccagttcaggcaaaaaaaacgctttaaccgcaaattagcggataaatgtttcaagctgtgatcacaaccgcaaaacctctgttcaacttttcttcagttgcatttatttcatgtggtttacacaagaaaaacttatcttaacattttgttctttctgccatttagccgacagaagccgatcgatattccatcaattatattagtagcgacgaatagtcggattctgcatagcgcgccagatccatacaatcgcaacggctaaaatcagccacggtaataacttaatcatcatcacaaataacccaccgaccatcataaaagcagccgcaaccagcaaagcacctaaaatgcccagcagggaaataccggtcaccatcagcatgatgaaaaaaccgataacaaagaaaatctctaacatggttggctcctcaataattgttatcatccaaaatattggataatgctgattgggtattacaagaagcgtgccagcttatagataagggctaattgactgaattaaatagagatgaacaattgtagcccgctaaagaacataacgggcttggtcattttgactaacttatagtgaattatgttgaggctgtttcactaatgataaggctttctctaccacggaaacatcggcgccaggcttatgagcattctcgcttaaatggcggcgccactgacgcgcaccgggaatgccctggaagatgcccagaatatgtcgggtgatatggcctaaataagccccacgcgctaattcttgctcaatgtagggatagagagcctctaccgccgctacactatccgtaatcgccgcctgtggatcgaagagttcgcggtctacctgcgtcaaaatactcggattttgatatgcctcgcggccaatcatcacgccatcgagatatttgaggtgttctttcgcttcatccaaggttttcacgccgccgttgatggcgatggtcaactcggggaaatcacgctttagctgataaactcgcggataatccagaggtggcacttcacgattttccttcggactcaaaccggatagccaggctttacgcgcatgaatagtaaacatatcgcaaccgccctgctctgagactttctgcacgaaatcacacaaaaactcgtagctgtcctgatcgtcaatgccgattcgggttttaaccgttaccggtatggaaaccacatcgcgcatcgctttaacacaatcggcaaccagctccgcttcccccatcaaacaggcaccaaagcgaccgttttgcacccgatcggaagggcaaccaacattcagattaatttcgttataaccacgctgttccgctagtttcgcgcaatgggctaacgcctgcggatcgctgccgcccaattgtagcgctaccggatgatcttgctcactgtaagccagataatcagccttgccgtggataatggcaccagtggtgaccatttccgtgtaaagcagcgcctgtttggtcagcaaacggtggaaatagcggcagtgacgatccgtccaatcgagcatcggcgcgacggagaaacgttgtaatgggtagcctgaatgaccagtttgggcgttagatacagtctgattttcgtgcatgtgcggtgagtttcatcggttgttattacgtcaattcccgctgttttggttgcatagcaaatcatcagtgggctggaatgcgggattataccatagaacctaaggacgcattccagcgcaataatcttacgacttaacctattgatctatgcggaaatgtgacgcggatagaggtaactcacggcgcctatcggcgatcacgcggagatatgttaaaattgcacaaataataatgttgcgggacgattatcatgacttcaatcaaccaagaaaagctgcttgctcaggccgaaagcctgtgtaaacaacgaaatgtacggctgactccgcaacgtttggaagttttgcgtctgatggcacagcaaccgggcgcaatcagcgcttatgatctgctggatttattgcgggtttccgagcctcaggctaagccgccaaccgtctatcgcgctttggattttcttttagaacaaggatttatacacaaagttgagtcggcaaacagctatgtgctgtgccatcattttgaggagccgctgcacacctcagcgctgtttatttgcgatcgctgcggtttggtaacggaaaaaaccaccgttggtattgaagaagccttagctttgctggcgaaacaatcaggttttgcgctgcgtcacagcgtggtagaggctcacggcctttgcgccacgtgcggcgaagtcgaagcctgtgatagccatgaacattgcgatcacgaccatagtctagtggcaaaaagaaagtaaccttggaaaagtaacccctggtgcagaaatcatttctgtcgtcatacggcggcagaaataaaataaaaaatggtttgtcgtcatgactcactgtattaattaacattgtattgattgacattaattataaccaacactggaagtgtcagcacctccttgtgcttgcaacatcttaatataaaacatgtaaacttgatgatattaaattatattttaataaataactctatttataaaatatcgacacatttaataacaccgtggagggaggtaagttttatattcatatattaataccaactcaggttaccagcgatatttggtatgatcttcccaagctttcacttctttttccgcagcttccttctgataaccgtatttttcctgaattttacctaccagctgttcgcgtttcccttctatcaccttcaggtcatcatccgtcagcttgccccatttctctttaattttccctttaaactgcttccagttaccgtcggcttgatctttattcataatatctccgttaacttttgttagctcagtttatttaattcctattaatatataggctaatataattaccagtaaattaataagacaatcttaaattgaatcgttgtcttattcttaccgtgaaataactatagcagagcattctgccgatggctaaattagtactatggaatagtaatgaaatagtaggcaggctaagaaaacctcatattattctgtatttaaatcagcaagtaactcgttattatcggatagttctcaatattactaaaacactgtcatgtgagtgattaaccaatatatatgccttcatttctgatgagatacaggattatttgagtcgtagcacacataataaaaccccaatgaaggggctttatttaagggataaaatcaattgctattaacgctaactaccgcaggtaggaatacgtggttcgttaaatccagtcgccattgcggataacgccaacggctaaaccttcgatagtaaatgtttgctcgcgcagatcgacgacgatgggctgaaattcactgttttcaggcagcaactgaacaatattaccttgttttttcagacgcttaacagtaacttcatcatcaatacgcgccaccacaacctgcccattgcgcacatcctgagttttatgaaccgcaagcaaatcaccgtccagaataccgatatctctcatagacataccgtttacccgcagcagaaaatcagcattaggcttaaacagcgaaggatcaactttatagtgaccttcaatatgctgctgcgctaacagcggttcgcccgcagcaacccggccaatcagcggcaggccttcttcgtcttccattaataggcgaataccacgagaagcgccggagacgatctcaatcacccctttacgcgccaacgcctttagatgctcttctgcggcattaggcgaacggaaccccagacgctgcgcgatctcggcacgtgtcggtggcatgcccgtttgcgagatgtgatcgcgaaccaagtcgtagacctgttgctgtctggtagtaagtgctttcattccgccccctgtttgtttatacagtttagctgtgagtatatacagccaaacccctattgggaaccgaagagtgaataaaaacagggattaatggctgtattgttcttcaccactatttgctctttccctgaactatgccaaattcaagtattgccacagcacagtagcccaaataaataccgccagcaggatagtgatgagcactgcggcggaccccatatcctttgcccgacctgaaaggtcatgcagctcgctgccaatccggtcaacaaccgcttcaatcgcactgttgataatttcaaccaccaccaccaagacgacagatccgatcaataaaattcgctctatgactcccacatcaagccagaaggccagtatgatagcgatgacggccaccacggcctcctgccggaaagcggcttcatttttccaagcagcggttaaccctttcacagaataacctgccgctttatagatacgggttagtcctgttgattgattagccatgagttatgtacctttttattggattgataatagtttcgctgcttccatcagtctgatcaccacagatctcaaaacgagtttctggtatccttgcggcgaattgctaacaagaggcttcacgttgttatgtcaggttggcgtaaaatatattataagttactgaatttaccacttaaattgttggtaaaaagcaaggtaatccccgcagatcctgtgactgaactggggttagacccgtcacgtccaattttgtatgttttaccttataactctaaggctgatttgctgacattgcgagcgcagtgcctggcacaagatcttcccgatccgttgattccactggaaatagacggtgcacagctgccaagtcacgttttcatcgataatggcccacgggtatttcgctattatgccccgaagcaggaatcggtaaaattattccacgattatctggatctgcatcgcaataatcctgagctggatattcagatgctaccggtatcagtaatgtttggccgctctccgggccgggaaggtcacggtacaccacatctgcgcgtactgaacggcgtacaaaaattctttgccgtactgtggctgggtcgcgatagctttgtgcgattctcgactaccgtttccctgcgccgcatggccagtgagcacggcactgacaaaaccatcgcccataagctggccagagtcgcgcgtatgcacttctctcgtcagcgtttagctgccgttggcccaagtctgccggcacgtcaggagctatttaaaaagctgctggcgtcaaaagctatcgaaaaagcggtggctgatgaagcgcgtaccaagaaaatttcccacgaaaaagcgcagcaaaatgccatcaatttgatggaagagattgcggcaaacttctcttatgaagccgtgcgtttatccgatcgcgtgttgagttggacctggaaccgtctgtatcagggcatcaatgttcataacgccgagcgcgtgcgccaattggcacaagatggccacgaaatcgtgtatgtcccctgccatcgtagccacatggactatctgttgctgtcctacgtgctttatcatcaaggcctggtaccgccgcatattgctgccggtatcaacctgaacttctggccggctggcccgattttccgtcgtttaggtgccttctttattcgccgtacctttaagggcaacaagctgtattccaccgtgttccgtgaatacctaggtgagctattcacccgtggttattccgttgaatactttgtggaaggtggccgttcacgcaccggtcggctgctggaacccaaaactggcaccctgtcgatgacaatacaggccatgctacgcggcggctcccgccctattactctggtgccaatttacatcggttacgagcacgtaatggaagttgggacatacgccaaagaactgcgcggcgcgaccaaagagaaagaaagcctgatgcaaatgctgcgcggtctgcgcaaacttcgcaatttgggtcagggctatgtgaactttggcgaacctttgccattgactacttatctcaacaacaacgtgccagactggcgtgatgctatcgatccaatcgaagctcagcgcccaagttggctgactccggcggttaacgatttagccgctaaaattatggttcgtatcaataatgccgcagcggctaacgcaatgaacttatgttctaccgcgctgctggcatcgcgtcagcgttcattgactcgcgagcaactgttggagcaactcgattgctacctgcaactgctacgcaatgtgccttacgccaaagatgtgaccgtaccggataaaacgccggaagagttgctgaaccacgcgttgaaaatgaataagttcgaggtagagaaagacaacatcggtgacatcataatcctgccacgtgagcaggcggtgttaatgacttactaccgtaataatattcagcacttgctgatgctgccttcactgattgctagcatggtgatgtaccatcgccgtattactcgttccgagttattacgcaagatcggtatgatttacccaatgctgaaagccgagcttttcctgcattataccaaggaagaacttgcgccaacgctggatacgctggttaacgaactggcgcgccaacagttgatttgcgataaaggcgatgaattagtgttgaatccagcgcgtattcgtccgttgcagctgctggccgctggcgtgcgtgaaactctgcaacgctacgcaattacgctctctttgctcagcgcaaacccaagcatcaatcggggcgcgctggagaaagagagtcgcatcatggcgcagcgtctttccgtactgcatggtattaacgcgccggaattctttgataaggccgtattctccacgctggttgcaactctgcgcgaagaaggctatatcaacgatattggcgatgcggtgcaggaacatacgctggaagtttacaatatgctaagcaacctgatgacgccggaagtgaagctgacgattgaaagcgtcagtatgcctgccgagacaaatcagttacctgctccagataaaccagcagaataatttccagatagctgaataagcaaagggccagataatatctggccctttctatttgtatcatttggggtttaattcaatgaccaatagctcaacagaatcccaaggaacagaaccaaaccaacgtaattattattcaggaaagcctggaaacaaggttcacgctgacgtttagcaatcattttctgctgatgaataaatagagcgccggctaataaaacggaccaatagaacgccccgcctaaatgcatcagataaccgataatcaccatcaataacaacgtagccagttgcagcaacccgacgatgaggcggtcatactgaccgaatagaatagccgtggatttgacgccaatttttaggtcatcgtccctatctaccatcgcatacagcgtgtcataagcgacggtccagcaaatattcgccaacagcaacaaccaacataccagcggcaggctttcgcttactgcggcaaaacccattggaatcgaccagccaaatgccgtgcctaacaccacctgcggcaagttggttacccgcttcataaagggataaatccaggccagtgccagccccaccagagatagccagatggtcatactgtttaaggtcagaaccagcccgaacgagatcagcaccagtacgccaaacaggattttgctttctttttcgctcacagcgccactgggcaatggccgtgaagcggtgcgttttacgtgtccatcgattttacgatcggcgaaatcattcaccacacagcctgcggcacgcatcataaacacgcccagcacgaacacgatcagaatttttgcatcaggaataccgcgtcctgccagccataacgcccataatgttggccacagtaacagcagtgaaccaataggcttatcaattcgcatcaaacggcaataggcgcgccatttgctttgaagaacacttccatccaatttatttatctcccaaatctttgctcatagtcacaccctggaaagctgatataacggcgacgctggcaagaatacttccgtcagtaacaggggtttcccagacaggcgtaaaagtgaacggcgcgcccaaagcttttcctgtaaccccgtttggatatagtctcgcgtcagagcatcgccactgaacagatagcgccctagaggcaccgttcccagatccaccagcgcacgatcggagccagaaagggtttcttctggcaccaccgtccgccccaataaccaaggctgagcatcaccgaacaaaataacttctctcagccaataacgctggcttatcggcaaatgttccgcctcttcacccagttcatcgcgagtaataaaacattccagctttggttcgatatgtacccgttggcaatgttgctcaaaacggcgggtcattgaccccagctccatcaaccaatcggcaatatcggcactgagattaggctgatcaatagatcgccattgaataggttttagaattgatacctcgccgtatgacattcggctcgctcccgccggggatacatctggctccccgcaattggtcaacatggggctattgtagcgcagaaagcccttggggtaacacgtcgagtagcatctgatgatcataacgacaacagtgagttaactgcgtcacatttgcagaatgcattaggtaaattgatctaattaagagaaataaggtttagaaagggaagaacgcgataaccatcataaatcatcgccaaagatgtcgcagataaaatcagtcggggtatacattcgtacgtaaaccaaaatccacacgcgcagtagccgccatagatcacaaagaaaaaaggtgcgccacggcgcaccaatcatccagccacattcggcagcgctgggtatctagcccttgcctttgacgctgccaataaaggtttgacgcgcggaggttgagcctagtttttccgcttcattcagcagtttcagcgctttatccacatcgcccgcttttaccgcatctttgatcgcctgattgaaatagctttcggtatcgttaagcattggctcggtcggtttactcaccgtagccggtgcggctgccactacgggctgagtatttccgaccacgacaggagcgggcgcggctggctgagtgaaaccaatcataatgttgcccatgctttgttccgcagtggctttgattttcagcacaccagtcggagcatggctggcgataggatcgggaatatttggtactgcgttacctacgccttgggcataggctttggccggatcgagcagttgagtcgtttttgccagatcctgtttggtggtgtacaccagcaggtagatttgtttttggcctaatgctggagtcagtttcagtacgccttcaagacgatcgaaactcatgatgccggctttttcgtaggtaaaatagctggctggatagtaggccgccgggcgcatttgttcgtccagcaccacgacgcttggagagtagagtttattatccaccacctgactactcagcgtgacttccatcgaaccgcgatcggctggcaacgcgaaagcggctaccgcaccttcaatttcaccctgagaaatatgcgggctggcgttggtcagtttgatttcctgcgacgccggtggaactaacggttgccacggcaagctttgtaaagtcgatggactaatgctcggtgcaaccgaaacattggccggagaaatagtagaagcggcctgcactgccagcggcgcagtcaaacccaaggccagagacaaacagagtgacagcagattctttttcattgttataccctcatagattgagcgtcagcgctaactccgcacgggcaaggtcggcaaagttaaccaatccataaccctttatgtttcaatcggctttaaggtggcgatttgaaatttatcgggttatcacttgatcttgctttaaaaaatcaaacagccgccccgaaggacggctgcgtcactgctgttaccaccaggcttcgaattgtgcgccgaaggttacttcgttgtttttaccacggctatcggtgccgatagtgccgttctgcgccagcccgaggtcaggactgcccttaacgttatcgtagccccatttctcatcccagtttgcataggttgcaaacacgcggatggccggacgagaccagatgctatcccccgcctgccattgttgagccagagtcagtttgtactggccgttacggtcgccggtacgctgagatttcacgttgtcgtagcctgcttccagtaaggtgctcatgatcggcgtccatttatacattgggcgcacgcccacactgtaccaagtggtgccgtttttgttatcccaatcggtatcctggtataaagcgacgtacatcatgtcccatttttcagccagattaatggcaccgtggtcaataatacgcagcatactgccgttgttattcaccagagagccctgtgaatggccgctgttccatgaggtcatcgaatcggtggcgtactgaaccacaaatttgttaaagccgccgaacatgctttgagtatgttccgccgtcagcaagacgccgtctttggtcgcatcttgtgccaatgcataaccgtcctgagtattagcgcgaccgtagtccacaccgaactcaagcgtaccgcctgggttggtttccaatccggctaaacgcacgtcaaacacgtcattaatggttttatctgcatctttacgctgattatcgatccaggcgctggagccaccggcttcagagttacgggttgcggccaaagacagcttgccgaagcccagatcgatgttttccaaacctgcacctgggccggagatatcccagtagtagaagtcgatcatgtgaacgtcatgacgttgatagaagcgtttacctgcccacatggtggaacccggcaaccattcgatcagattcttaccctgcacgttggcttcacggaaagcgggatccgttgattcccaatcgtcacgctgtgatacggaataggctacgttggtatcgaagtagaagcttttatccccttctttccacagttcctggcctaatttgatttccgcataggtttcacattcgttgcccaaacggtatttagtttgagcgccggtggttttgaaacattgttgctcaccgccgctccctgtccaaccgataccagaacgtgcataaccgtggaaatctacggccatcgcttgtgttgacagaacaccagcggcaacagccagtgctatcggtaacttgcgcagagtagtcatcagaaatctcctgtttaatttgcctaacggcgtgcgtgctttacattcactgtcagtagacgcccggctcttgatgcagccgttgacacgcagagccatcttcacggaacagatgacagcgatatggcggcagcccgatggcgaatgttgcaccttcttctaccagcaccacgtcgttctggcggtaaaccaggttctgacgtattgcggggatttggatatgaatctgtgtttcattgcccagttgctctactacctgaatcgggccttccagcgtgacttccgattcgctgcttggcagcagatgctccggtcgaatacccagcgacatattggcgccgacctgtacgcgatcgccttccaccggtagccagaccaactggcggttcggtagctcgatttgtacctgacgaggctcaacggcggtcactttcactgggaggaaattcatttttggcgaaccgataaaaccggcgacaaagcggttggccgggtagtgatatagctccagcggtttacccacctgcgccacgttaccggcatccaacaccacgattttgtctgccagcgtcatggcttcgacctgatcgtgcgtaacgtaaatcatggtgcgttgcaggcgcttgtgaagtcgggaaatctcaatgcgcatctgcacccgcagcgcggcgtccaggttggataagggttcgtccagcaggaacacatccggttcagccaccagcgtacgaccaatagcgactcgctgacgttgcccgccggacaaggcttttggccgacgatccaataggtgcgccagttgcagcacttcagcgacctgattaactcgctggttaatttcagtttttttggcaccggccagcttcaggccgaaagacatgttttccgccaccgacagatggggatagagcgcataagactggaataccatgccgatgccgcgttctgcgggcggcacttcgttcatccgtttaccgccgatcaacaactcgccagcggtaatatcctcaagaccggctatcatgcgcagcagcgttgatttcccgcagcctgacggaccgacaaacaccacaaattcaccatcttcgatctccagattgacgtctttggagatcacgacctcaccaaaggccttataaacgccgcttagcgttacgttagccatgcgttactcctttgcttgcgcaaacaactttttcatgtgaatccgattgaagaaaaatggcggaagcaaaacccggcataacccagcgatgactcccagcactctgatgactttctctctgcgcgccgtgccgccatgccactggcaaggttgcctcggacggcgtcgccgtctgagtataaggctgcaaattgatcagcgcttcaacacattgatcttgctgggtaataaataatctgattacgccgttctgctggctgatttcagccagttgcccttgttgaatcaccggctgacggcgtagagccaacaacgtttggcaaaagcgcagggtggaatcaggatcctgctgctggcggctgatggccatagcgcgatgttcaatagccacacgctgataccaatgaatctctccggacgtagcctgctctggcgcttcgtgccacggcatcggcgtctgcgcaccttgtggttcctgtagcgaagcggcgtgaggcaagcccagctcttccccttggtacagcgctataggcgcgggcaatagcgccagcaaggtcagaaaagcgtctgcggagcgaagatcgccctgcccccagttgctcactacccgtggccgctcggcgtcgccggtgctccacacggactgagaaagcgtggcccgacgctcggctaataccgacaccagtttttccgaactgaacggcaccacctgctgagccaaggcaccttgcaatagcggttgctgtaacgcctcggagcctgcgttgctctgtgggttaatccacaccgccaggccttgttcggctaaccgccgagccgtctgctcgcagggttgcatatcctgtggcacaaccagcccatcaatcgataaggcgttcagataagtcagtgctctcaacaggccgcgataatcccccatgccgtcgccgtttccgtcacggaaactgatcgggtgaacccgatacaacgtaggatgaggaacggcacgcgctggcaacatagtcctggccctgcaaactgtggttaaaattgatgctgctgatactgcgggaatgccgcaatttggtaatcatccgtaacaaagtttttcatgggggaggagatgggaggatgagagaggtaagggggtaagcgaaagttcccaccgaaagacaaattcgtgatcctgcttacaaatttcgaccggtatttttgtggctaaccccacagaataggcagcagtgttaactgggtcacaataaccttgtcgggggcgtagacggggggaggatgagactgtgtccggttgtgacccaatatgacagcgtactaaattgcagcgcacccacattatgacgctgtcgctgccacctcgcactgtgactcacagctacccgataagcggctattgattcacacgaaagtcggtgcccacaaaattggataaaaggattggattatgactcacagtttcatgaagtccggcgttggtaagaccgctcgagtcctggcgctttccgcgctgaccacgctggtactttcctcttccgcttttgccaagattgaagaaggtaagctggttatctggatcaatggcgataaaggctataacggtctggcagaagtgggtaaaaaattcgagaaagataccggtattaaagtcaccatcgaacatcccgataaactggaagagaaattcccgcaggttgcggccaccggcgacggccctgacattatcttctgggctcacgaccgtttcggcggctacgcgcaatccggcctgctggccgaagtccatccatccaaagccttccaggacaaactgttcccattcacctgggacgcggtgcgtttcaacggtaagctgatcgcctacccaatcgcggtggaagcgctatcgctgatttataacaaagacattattaaagacgcgccaaaaacctgggaagaaatcccagcgctggataaagaactgcgggccaaaggcaaaagcgccatcatgtggaacctgcaagaaccctacttcacttggccggttattgccgctgacggcggttatgccttcaagtttgaaaacggcatctataacgtgaaagacgtcggtgttaacaatgccggagccaaagctggcctgcaattcatcgtcgatttggtgaaaaacaagcatatcaatgccgatactgactattccatcgctgaagccgcctttaacaaaggccaaaccgcgatgaccatcaacggcccgtgggcgtggtcaaatatcgacaagagtaaaatcaactacggcgtcacgctattgccgactttccacggccagccgtctaaacctttcgtcggagtattaagtgccggtatcaacgccgccagcccgaataaagagttagccactgaattcctggaaaactacctgttgaccgaccaaggcctggctgaagtaaataaagacaagccgctgggcgccgtggcgctgaaatccttccaagagcagttggcgaaagatccgaagattgccgccaccatggataacgccaccaaaggcgaaatcatgccgaatatcccgcagatgagcgcattctggtacgccacgcgcagcgcggtattgaacgcaatcaatggtcgacaaactgtagaagccgcattgaacgatgccgcgactcgtattaccaagtaacggctctgctcgttaaaggggcacggattccgtgccctgataaattcttcacgtcagatcgcagtgctgtagtcgctacagaatggccaaatagtcacaaaagggacccgttatgcagttatcccaaaccgaaagttatggacgcaaaaagaaagtcgcctggtggcagagtgatgcgctgaagtggctggctattggccttatcagcctgtttacctgctatctgatcatattaatgtatgcgcaaggtgaatatctttttgccatagtgacgctgattctggttagccttgggctgtacgtgtttgccaaccgtcgcgcctatgcctggcgctatgtttaccccggcgtggccggtatggggctattcgtcctgttcccgctgatttgtaccatcgccatcgcctttaccaactacagcagcaccaaccagttaacctttgagcgggcgcaatccgtattgatggatcgtcagttccagaccggaaaaacctacggcttcggcctctatcctgcgggcaatcaatggcgtttacagctcaccacgccggatagcgatcaacttttgatatctgagcctttcagcctcgatgggctgagcgagcagcgagttaacgtcgctccggccaacactgaagcacagggtgaacgcgcctctttgcgagtgattactcaaaaccgtcaggcgctaaaccaattggtcgcggtattgcctgatggcggcgaactgcgcatgagttcactgcgccaatttgccggaaccagcccgctgtatgcgcttggtgcagacggcagggagctgattaataagcaaacaggcgttatttatcggcccaatattgcagaaggcttttatcaggccgtcaacgccgatggacagtgggaaaatgaaaaactcagccccggctttaccgtcactattggctggaaaaacttcctgcgcgtgctgcacgatgaaggcatccaaaaaccgtttatctcaatctttgtctggaccattattttctcggttctgagcgtgacctttactgtcgccgtgggcatggtgctggcgtgcgcagtacaatgggacgcattgaaaggcaaagctatttaccgagtgatgctgattctgccctatgcggtgccgtcctttatctccattttgattttcaaagggttattcaaccaaagcttcggtgaaattaacctgatgctgagccacctgtttggtatcaaaccggcgtggtttaacgatcctctgaccgccaagagcatgattttaatcgtcaatacctggctgggttatccctacatgatgattctgtgcatgggattattgaaagccatccctgacgatttatacgaggcttccgcaatggacggtgccgggccgtggcagaacttcaccaaaatcaccttcccgctgctgatcaaaccgctcacgccgctgatgatcgccagttttgcctttaactttaacaatttcgtattgattcagttattgactaacggcggcccggatatgatcggcaccacaacgccggcagggtacaccgacttgctggtcaactacacctaccgaatcgcttttgaaggcggcggcgggcaggacttcggcctcgcggcggcaattgccaccctgattttcatattggtaggcgcgttagcgatactgaatctgaaagccagcaaaatgaattttgattaaggaggagaggcagatggccatggttcaacctaaatcccagcgtttgcgtctattgggtacccattttctgatgctctgctttatcgcgctgattatgttcccgttattgatggttattgccatttcactgcgacccggcaactttgctaccggtagcctgattccagaccagatttcctgggagcactggaagctggcattggggatgagcgtgactcacgccgatggcagcgtgacgccgccgccgttccccgtgatgctgtggttgtggaactcgattaagatcgcggtgattaccgccgccggtattgtcaccctttccaccacctgcgcctatgcctttgcgcgtatgcgtttcaaaggaaaaagtagcctattgaaaggaatgctgatttttcagatgttccctgcagtgttgtcactggtagcgctgtatgcgttgtttgaccgactcggccaatatttaccgtttattgggctgaatacccacggcggcgtgattttcgcctacatgggcggtatcgcgctgcacgtttggaccattaaaggctattttgaaactatcgataactcgctggaagaagcagccgcgctggatggtgcgacgccctggcaagcattccgattggtgctgttgccgctgtcggtaccgattctggcggtggtgtttatcctgtcgtttattgccgccattaccgaagtaccggtggcctctctattgctgcgagatgtgaacagttacacgctggcggtcggtatgcagcaatacctcaatccacaaaactacttgtggggtgacttcgccgcggcggcagtcctgtcggccattccaattaccgcggtgttcctactggcacagcgctggctggtgggcggattaaccgctggcggggtgaaaggttagtcagaatcgttttgctggtacaggtgtctgtgtcgggtgactgcaccagttggttacaaagcatgccactgcttactttgctgtaatttaccctggtactgtgtctttatggcggcctatatggccgccattttttatgcctattattgtttactcgcgttttagtcgctcggtattggccagatataacgtcaccaccagcagcagaatcgacgccgaatacaccagcgtatcaatagggttctcgtgatcgacaataatcagccggataatggcagttattccgatatagataaaatagcgtagagggaagtgataacctgactcaaagtacttcactatcaatgcgataaactcgaagtacaggaagtagatcactattccttcgatcaacttataggatgaggtttcctgattattggtaaacaaaacctgcccaagatgaaacgtctctttaatcagaaagaccaccaaaatagcggccaacgcgatcaagccaacgtttaataaacgctgtagatttttagctacccattgagaacgcgaatttttcgccatagatacacccagagaaagagggggaaacagtctgaggctaacacaaggccaagcctcagaccgaaaaaaggccccttacatcagtaagaggccaataataagcacggatcaaagagctttagctctctagcttaacgccagttcttgaaacggttaatcaacgcattggttgagctatcgtggctggtcaccggcgcatcatccgccagctcaggcagaatgcggttagccagctgtttgcccagttctacaccccattggtcgaaggtgaagatattcaggattgcgccttgagtaaagattttgtgctcgtacagagcaatcaacatccccaggctgaacggagtaatctcgcgcagcaagatggagttggttggacggttgccttcaaagactttgaacggtgcaacgtgcgccacttgctccggcgttttacctgcggcggcaaattcggcttccacttctgcccgcgatttaccgaaagccaaagcttcggtttgcgcgaagaaattagacagcaacttagcgtgatggtcgctcagcggattatggctgatagctggcgcgatgaaatcgcaaggaaccaatttagtgccctgatgaatcaactggtagaacgcatgctgaccgttggtgcccggctcgccccagatgattgggcccgtttggtaatcaaccggattgccattacgatccacatacttaccgttagattccatgttgccctgctggaagtaagccgggaaacgatgcatatactggtcatacggcagaatcgcttcggtttctgcgccgaagaaattgttgtaccagatgccgatcagtgccaatagaaccggaaggtttttctctgctggagtttcggcaaaatgacggtccatagcatgggcaccgctcagcaactgctcgaaattctcgaatccaacggacagagcaatagacaggccgatagcagaccatagtgaataacggccgcctacccagtcccagaactcaaacatattgtcggtatcaataccaaactcggctacggctttaccattagtagacagcgcagcaaagtgttttgccacatgcgcttcgtcctgtgcagcagccaggaaccagtcgcgagcgctgtgcgcattggtcatggtttcctgagtggtgaaggttttagatgcgaccaggaacagcgtggtttccgggttcagcggtttcaacgcttcggccatatgggtgccgtcaacgttggaaacaaaatgcatattcagatgatttttgtacggccgtagcgcttcggtcaccatgtaagggccaaggtctgagccaccgataccgatgttcactacgtcggtaatcgctttaccggtgtaacctttccattcgccgccgatcacgcggtcacagaactgtttcattttagccagcaccgcgttcacttctggcattacgtctttaccatcgaccagaatcggggtgttgctgcggttacgcagggcaacgtgcagtacggcgcgatcttcggtacggttaattttttcaccggagaacatggagttaatcgcaccggccagatcggtttcttttgccagtgcctggagtttttccatagtttcagtggtgatgcggttttttgaaaaatctaccagcatctggtcgtcaaaagtggcagaaaatttctcaaaacgctgcttgtcctcggcaaacagatcgcggatttgcacatctttcatctgttcaaagtgttgttctaacgctttccaggcagcggtttgactaggatttacatttttcatagcgacgctcttctaggcttaaggataatgaaacgaatgcgttaattgtatcctgttaacctgtgattgagatctcttttcttgcgataggtaataactctcgatcagaaaagatccccattccctttttaagggcaaaattcctatacttcaggataacaacctgttactgaggttgtgtaactgtcacaggtatgtggcagattaaaacatacccacttttgcttaagattaaaaaggttgtcgctatggaattatctcccccgctaatgttggtggtgattggtctgagttcattattggcgcagtgggtcgcctggttattacgcttaccggcgattcttccgctgttattgatgggtattgtacttggcccgctggtgcactgggtgcagcccgatttgctgtttggcgatttgctgttcccgcttgtttccctgtccgttgccatcattttatttgaaggcgcgttaactctgcgagtggaagagattcgcggtttgggcggcgtggtacgcaatctggttaccgtgggaatgttggtgacattttcggttatcagcgtggcctgttggtggctactgaatttccctccagaattggccgcgctaatcggagccgtcacagtggtgaccggcccgacggttattgctccgttaatgcgagtggtgcgcccaaaatctacgattaatcaggtgctacgctgggaagggattgtcatcgatccggttggggcgatattcactctgctggtttttgaatttattgtcctgaaacagaatgcagaatcttacactcacctgttctggacgctgggtattaccgccgcggtgggtttgatcgccggcgcgctatttggctatttattaggattggcgctgcgccgcgtctggctacctcgctatttgcaaaacctggcggtactggcaattatgttggccgcgtttggtatttctaacgccattgccgatgagtccggcctgcttaccgtcacggtaatgggcatctggctggcaaatatgcgcgatgtcgataccagcgatattctggctttcaaggaagaattatctgcgattctgatttccgctctgtttattattctggcggcgcggttggatattcatgctctatggaacatgggttggccgctactgattttactggcggtagtgcagtttattgcccgtccgctgtgtatcgccgtttcgacctggcgatccagtctccattggcgcgatcgtctgctgttgtgctggatcgctccgcgaggtattgtcgcggcggcggtcagctcattatttgccctaactttacagcgtaatggctacgaaggagcggataagctggttacggtggtttttgcgattattatcggcaccgtcgtgctgcaaagcctgaccagcggaatgatggcgcgctggctgagggttcagcagcagaagccgcgcggcgtactgattgtcggggccaatagcgtggcgcgcatgctggcgcaggcgttgcttaaactgaatattccagtgctggtcacggatagcagttgggaatattaccgcctggcgcgtatggaaggcattccggcctattatggtcacgcttactcagaacatgctgaaaactatctcgatctgagcgaaaccgcgcaggttttggcgctatctcccaatcgccaccagaatgcgctagcggtgtaccattttggccatatctttggcgatagccatgtgttcgccattcgttccggcacgctacaaaaagggcgaaccaatgcggaaagtagccgattccgccgccacgaagtgctgttcgcgccagaagccacttatggccgcttaagcagccagattgccaaaggtgccaccatcaaagcgaccaaactcagtgaaaactttggctggctggaatatctggagaaacatcagggcattattccactattttatcagcgggaagacggcactttgcagccaattagtgccggcgtggctcccgctgtgccctgcactttgatagccttggtacaggacgataattcatcggcaagccgctgattacccaagaaatcacttcaaccagagggaaggccaggcgtcttccctttttattataaaattgacgaataagcgctcggtcagaaaaaatttttattgttaacaattggtgacatcgttggaaaaaccgctattttgcagataatcccaatacattgccctcgccacgccacagattcccccactaggctgaaaaccggcagtatgaaggtgaaaaaacctcattgtgccgccgttgacagcggcccgagaacccgttattcctaaacacctacttacgcagcattgcgtaagccagaagaggtgcgtcgcccaggtagagtgtcggaggagccgtaatccgctgaagacatttgagggggagcgacgccgagacgtgatgacttcggctatcaccacgtcgactacaggggctgaatcccctgggttgtcaccggaaaccgttcatttagaatggttagcaaggtggagcgcttctgggtgtaccctagcgtaactcttatgcttgtgccccctgtctcccgctcttcccttgtgccaaggcttatgtatttagatgaccaccctgcgcggtgcatccctgacacgaggttttttagatgattcatgcagcatcccaacaggctaccgtcgtcgccaaatttggtggaaccagcgtcgccgattttaccgccatgagccgcagcgctgacgtggttctgtctcatcccgatgttcgcctggtcgttctctcggcctccgccggtgttactaatctgttggtcgcccttgccgaaggttgcgagccagaacagcgcgcctttcatctggatgaaattcgccatattcaatatgccattctcgataacctgaaagaatccagcgtagtacgtgatgaaattgaccgtatgctggacaatatcgccatgttgtccgaggccgccagcctggcgacatccacggcgctgacggacgaattggttagccacggcgaactgatgtctacgctgctgttcgttgaaatcattcgccaacgcgacgttgccgtggaatggttcgacgtgcgtaaagtgatgcgcaccaatgatcgctttggtcgagcagaacccgatactcaggcattggccgaactggctcgagcccagctggcgccgcgtctggccgaagctattattgtcacccaaggctttatcggcagcgaagctaaaggccgcaccaccactcttggccggggcggcagtgactataccgccgcattgctaggtgaagctttgagcctcagccgcgttgatatctggactgacgttccaggcatttacactacggatccgcgcgtggtgcctcaagctcagcgcatcgataaaatcgcttttgaagaagccgctgaaatggcaacttttggcgctaaagtcttgcatcccgccaccttattgcccgccgttcgcagcgatattcccgtgtttgttggttcgagcaaagatccggccgccggtggcaccttagtctgcaataaaaccgaaaatccgccgctgttccgcgcgctggcattacgtcgtaaacaaacgctggtgaccctacacagcctgaatatgcttcacgctcgcggttttctggcggaggttttcaatattctggcgcgccataatatttccgttgatttgatcacgacctcggaggtcagcgtggcgctaacgctggataccactggctccacgtcaaccggcgaaagtctgctgaccacgtctttactgaccgagctatcctccctctgtcgggtggaagtcgaggaaaatctggctctggtggcgattatcggcaatcagctttctcaggcttacggcgttgggaaagaagtatttggcgtattagatccattcaatattcgtatgatttgctacggtgccagcagcaacaatctgtgcttcctggttcctggcgacgatgccgaacaagtagtcaaaaccctgcaccataatctgttcgaatagataataacaatcagccgggtggataccgcccggcaccttctctgcacaacatcaccagataacaggacatcgcatgcttgccaaagtcactcgcttgttcccgctctggccggttttactgtctatcgctgcctattacactcccagcacctttacgccgatcggcccctatatcgggccatgacttatgctaatcatgtttgccatgggcgtaacgctgcggttagaagacttcaaacaagtgctttcgcggcctgccccggtggctgcggcaacttttttgcattatctgattatgccgctggcagcctagatactggcaatgctattccgcatgccgccggatctttccgctggaatggttttggtaggttagcggaacagcatctaacgttatgatttatctggccaaaggtgatgtggctttatctgtcactatctctgcggtttcaacgttggttggcgtattcgctacgccgctgctcacccgtttatacgtcgatgccacaatcagcgtagacgtaatgggtatgctgaaaagcatcctgcaaatcgtagtcattccgataactgccggattggttatccatcactgttttaccaagacagttaaacgtatcgaaccctacctgcccgctctctcgatggtatgcattctgaccatcatcagcgctgtagttgcgggtagtcagggacatattgcatctgttggattcgtggtgattatggccgttattctgcataacggtatcggcttgctcagtggctattggggcgaaaaactattcggctttgacgaatcaacctgccgcacattagctattgaagttggtatgcaaaactctgggctagcggccacattaggcaaaatctacttctctccattagctgcgtttccgggggctcttttctccgtctggcacactctttccggttatctcctcgccggttattggtcaggacgagcaatcaaaaaagcagcatcaaatgataaattaactaaataaagttgtcgtacccgataaatttcaggtgcgttctcgatctaaatacaaagacttacgcgcgtttaccttaaatgtcctctacgaaatttcacattcccatctgcacgggttgtcagctattaccatttcccctattatccaccccatagaaatgagttaggattcttctgactacaaagaataagattaatagtaaaaacaaaattaatctttataagaaaaaataatacttacttttcaatttttataaattttacaaacaccatggaattaacccttctaaaaagagtcattccatttagtcattctacgcatttaataagtcattaattatctgcgccaacatcgcagataaaggctacctgaaaaaggtgaactgacgcttcaagccatttgaggcttctctgttatttgctatttaaccttttcgagcaagaggtagtcttgccccgacgcattaaataaaggacagaaacagtaccaacgtctttatatggcgtgacagactgtctctcataataggattaaatgattaaaagatactccgcatttttattgcttttgagcgccagcgctcaggggaatactttgcctaatatgggtgacttctcccctatgagcgaatctcgtcgtgcattgcaggatagctcgcgtaccgttcacgaaataatggatgaacgtcgctaccaacagttaaagaaacaaaacctgttggattccgaagctgaaatgcatcacatggctttacctatgtcggcgcaatgtttaccgatcaatggcgtttatttacgcggcgtcactctattaaaaaacagtgacttagaatcgatcgctactttacctgaaaattgcatcagtagtaacgatattaatcaacttacccgtgaaatcacgcacttatatataagcaaaggttacgttactgccagagttcaatttatccagcctaatcaggatggtgaactgggtattaatgtcaccgaaggttttatcgagaaaattatcggtggtgaccactgggttaatagtgatttattatttcctgatttagtcggaaaaccgcttaatctgacacagcttgatcaaggattagatcaggcgaacaggctgcaatccaatacaactaaattagatattttacccggtaaaaaagacggtggttctattgttcgattgaacaatgtacataccaaatcatggcttttatctggaagtatggataattacggccagaaaaataccggaaaatggctggctcggacttctgccagttatgatagcccattgggtttatctgacttcgttagcttaaatgtcagtagcacattaaaagatccgcagcagcgctatagccgtgcctacaccatgctgtattccataccttacggtgcctggacatttagcggatttgccagtttctctgattatttaaatcatcagaaactagcgattaataccgttaaattagacggaaatacaaaacaatacggcctgcgtacggattatgtgtttcaccgggatcaagaccaaattgactcactgagcgcacaacttacctacaaaaacgttaataactattttgagtcatccaagctacatatcagcagcccaacgctgacggtgctggaattgggtgccagtcatatgcaaattctaccgcgcggcctgcttagcctgaatgccacggtagagcaaggcatgccgtggtttggctcagagcggagtagtggccgcaaacctgccggttatccggacgcacagtttaccaaagccaaggttttcgccagtttaagccagcgctttaccctgtttgataacccgtaccaattgactaactcgttctacggccagcacagcaaaaactctctaccgggcgtggaatggatcagcctgactgaccgcagcgcagtacgcggctttagtcatagcaccctttccggcgataacggttggtatctgcaaaatacgctgtctcgcacagttccagtgggcaataccacttttactccacgtttaggggcagatgtagggcgagtacaggcacgtcttagtcagcaaagctggcaaagcagcgcaggcctcagcgccggagtgaccttccgttatcaacggtcattaattgatgtggaagccagccgtggctggattctttccgagcataaaacccccgttgatccggtacaggttctggcccgtttctcgtacaccttttaacgatccttttattgattaataacaccagtagttaacgttataaaaacggaaatatctaggagatacacggatgaaaactaaaaaattcaaactgtcacccgcaggaaaactggttgcctctttggcgattattttcgcctcattgggtgcagcctacgccgccgatatcgtcggggccggtgacgcagcccataacccaaccatcagcagcgctgccaacggcgctgcggtagtcgacattgttgctccttcagcatcaggtttgtctcataaccaatacgatagctttaacgtcaataaacccggcgcagtgctaaataactccttaaccgacggcacctctcaactggccggtcagcttaatgccaacgccaatctgggcagtaacgctgcaaaaatcattctgaatgaagtgattagccgtaatccttctttactattagggaaacaggaaatcttcggcatggccgctgattatgtgcttgctaacccgaacggtatcacctgtgatggctgcggttttatcaataccaaccgctcttcgttggtggtagggaatccgctggttgaaaaaggggagctgaatggctttaacaccttcaacaatacccatgcgctctcaataggcaaaggcggactggatgcggatagcgctctggatctgattgcaccacgcatcagcgccgaaggccatatttcctcaccggagcaggtttatgctctgaccggcgaaaaccgtgtctcagccaaaggcgagattctggaaagcagaaacactcaaaaagcgggcgcattagacagctactaccttggtagtatgcaagctggccgtattcgcctgatcagcacagccgaaggaagcggtgtcaaaatcggcaatgaaatcgatacctttcgtttagctaacggtcaggtcaccgttggggatatcgatgttgcatcgaaaggcaatctcgagttagaggcagccaaattaaaaggcgccgatatcagattaacgggtaaaaacatcgtatccaaaggcaaaatcatctccgatagtcacagccgtaatgatagcgataactacgatacctggtggagcggcaaatacgttaacaaccgcgatagcagccagcgccttcaggaaaccagcatttcaggtaatgatatttcgattgttgccaagcaaaacaatacgctgaccggcgcatatgtccaaggccgcgatgtcactctgcaaggcgctaaccttaagctagatgggcaaaaactcacacaaaccgacggccatactgataatcgggatcgtggtgcctggcgtcgcaataccaataaagaaaacgagaaagttgaacaagttggcactgagattcatgcacatcgaaatgcaaaattaatggctgacgaaggcgatatcgtgatcagcggtagccaggtctatgccaacaacgatctcagcatcaatgcaaaaaacgatctgcatctatcgggtttaactgaatcacaaaccgtccgcgaaaatggcaaacgtaaaaatgacaccagcaaattactgacgggtagctggtccaatagcactacgacggaaaatcttaaaaccgcaaaactcaacgccgtaaccggtaatttaggcctctccgcgggcggtaatatcaccagtaaaggcgcggaagttcgagctaaaaaagacctgattgtcaccgcagacaaacaaatcaatatcgatgtacagaaaacagccaaccagaaaaccgtgaagaacgatatcgtggtttggggcggtatcggcggcggagatgataaggataatggcaataagaaagaagtcagccatgcctctgatttttctagcaatgggaaacttctggtatccggtaatcaaggcgttaaggttactggtagtaaagtcaccgccaaagaaggcgcattcgttgaaaccaagaatggcggtctggtcattgataacgccattagcttaaccaccgagaaagtggatcaacgcaccggtaccgttttcaatatcactaaagattcgaagaaagcgaataactctaccgagcaatctaccggtagcgaactgaaatctgatgcagatttaaaactgtttagtcagcaagatacgactatcgttggcagtctggtcaatagcgccgatgagttagggattaaaacgctgggcaatctgaatgttaaatcagccgttgaacagcaaaagattgacgaaaaaaccacatcgctgaaagtcgatgcctatgccaaagaacatagcgataaacaatatcgtgccggcctgcgcattgagcataccagcgaaacagaaaaaaccgacagcaccaagaataaagcggcaaccctcagcggcggcagcgtaaaaatcgaatccgataaagacgttacctttactggctcgaaactggaaacgaccaaagacgacgctaaaatcagcggtaataacgttgcttttctggctgcagaagacaaaaccaccagcgacaaaaccagcacaaaagttggcggcggcgtttactacactggcggtattgataaagcgggcagcggtgtagaagttggctatgaaaatagcaaaactcacactgacgcgaacaaagccgcggcatccagctccaacgtagcgggaaactttaccgttgaggcaaaaggcgatctgaccaaccaaggcactcagcataaagtgggggagaaactgacgcaggaagcagcgaatgtgaataacctcgcagctaaaaataccaaaaacagcaaaactgaaacgttaacaatcggtgctgaagtcggcgctaacgttgattacagcggcattactcgtccggcagaaaaagcgattgataagattgctaaactggacattctcggtgccgctaacgatttgggtgatattggcctgccgaaccttggtatcgatgtcggagccaacggcagcagcagcgatgtcactaaaaacagctcaaaagcgctcgttacttccgttcaggctggcagcgttgccacgaaaaccacaggcacagtgaaagatcagggcacgcaatacgaagccactaaaggcggcgtaaccattgaagcccaaagccacaccagcgaagcggcagccaatactgaaaccgttaatagccgtgagaccaaaggtaacgcagatctacgtgtttatacctccactggcagcgatatcagtgccgatgctaaaggcgaaggcggtactacccgtagcgaaaaagacgccagcaacgcggtcaccggcaagattaaagcggccgatggcattagtatcaaggtcaaagaggacgcgacttatcagggcacctctctggacgcaggcgcgggtaaaaccagcgtcaaagccggcggggacatcaaattcgatcaggccacggataccagcagcgagaaccataaaggctttaacgttaagctttctgccaaaggcggcagcacgccagagagcaacaacttcggcattggtttgggcggcggtatagacaacggcagcagcagcacttccgatgccaaagtgagtcagttggcgggtaaacaaggcgtagaactggattccggccgtgatttaacgctgaaaggcagccagattggtagcaaagagcagccaaccggcaatgtcacgctgaaagccgcgggcaaggttgatttgcaagcagctgaatccaccagcagcaaggaaaataccaagctgtctggcaacatcaatgtcggcaccagcagtaccgattctgaaaccaagagcggcggtggtttcaatctgggcggcgacgttaacttcgataaagttgatgaatcagccacgactcgtcagggtagtaaaatcgacagcaaagggacgctgaagattgaatccggcagcgatgacaaacaggctatccatttgcaaggcaccgaagtcaccagtaaagcaacggttctggatgctaaaaaaggtggcatagtgctggagtcagcgcaaaacgaagagaagaaaaacaactggaatttgggtctgaaaggcagcgcaggcatttctcaatcttatgataagaatgacaaaggcgtagtcgacagcgaatctggcaaagactctcataacgttagcgcgggtatcaacgtcggcgttgagaaaaaagatgcggttaaacaacagaataccaagattaataccggtaatctgacgttgaacagcggaaaagacaccacgctggctggtgccacagtgactgcggataaagtgagcggggatgtaggtggcgatctgcgtgtcgaaagccgcaaagatcgtgaaaccggtgtcaacgttggcgtggatttaggtttaagccacaccaataaaaaagaagataatctggtaactcgcgtttctgatgccagcccggtagggaaggaaaaaatcaaaaacgccttggaaaccaaagctaacaaagcctttgataaggttgaagataagtacaataagttcgctcacaaaaacgaccctaagcaagacaccaccaatgccgtgagctttagtaaagccaacgataaagtgaccttgccagagaaattggttgaggaaaaaactgacagcgcggtttgggataaaggcgctcgttgggcgggtaacaaagtgaaaaacaaagtcgttggcccggcagaagaaattggtctggatggtcacttcaaagttaacgctaacgtggtaaataacgatgccattaacgaaacctcagcgatcagcggtaaagaaggcgtaacgctgaacgtgaaaggtaacaccttgttaaacggcggaaaactgagcagtgatcaaggcaaagttgaactgaaaaccaaagctcttgagttacaggaagtcaaaggtaacaactatcagggcggcggcggctttaaccttgcgccaaccgtttctggtttgctcaccggcggtgcgaaagatgtattgagtggcaacactccgtttattcaggcccataccaagtctgaaaaccgtgatgtaaagggtggaattgaagaaggcaaaaaggatgataaggctgaagaaaccgagtaatcaaagctgaatcaaaggggttttagggacattatctgcgcctaaaaccccacctgaacatgaaaaaccggcgctgcctatctggcacgccggtttcttttagcactcacactcatttatcaatctgcatcgtaacccagattaggggccagccagcgctcgacttcggctatcggcatcccttttcgcgccgcgtagtcttctacctgatctcgctgaatctgcgctacggcaaagtatttgctttctggatggctgaaataccagcctgaaaccgaggctcctggccacatggcgtaggattcagtcagtttcattccggtgtgagtctccacgtccagcagcttccagatttgccctttttccgtgtgttccggacaggccggataacccggagccggacgaatcccctgatagttttcccgcaccaattcttcattactcaggttttcatttggcgcaaagccccagtacaccttgcgcacccgctcatgcagatattcggcaaaagcctccgccaaacgatcggataaggctttaatcatgattttattgtaatcatcatgctgagcatcgtaagcctccgccagagcatcttcctccagtccaccggtcacggcaaaagcgccgatgtagtcagctttaccgctggtttttggcgcaacgtaatccgccagacaataattagggaagtcatttttttccgtttgctgccgcaaatggtggctcaccagcagcacgtcatcgcgacgttcatcccgataaatctcaatatcatcacccacccgattggcagggaacagacccaccacgcctttaggatgcaatgatccttctgatgagagcttatccagcatctgatttgcatcagcaaacagacgcttagcctcttctcccaccacttcatcttccaaaatgcgcggatacttgccggccaacgaccaggtcataaagaatggtgtccaatcgatataatttcgcagtgtttcaatgctggcttcgacctgctgaaccccaagcttatggactaccggcggcgtataattttcccagtcaatcaccgtagcgttatcccgcgcagcttgcaggctgaccggcggcgtccgcggttttttacgcgcatgctgaatacggacggtttcatactctttgcgagttttagcaataaattcgtcccgttgcgcgtccgaaagcaacgccgataccaccccaacactacgagaagcattagaaacgtaagtggttgagccgctgtagttttgctcaatcttaaccgccgtatgcgctttggacgtggttgcgccaccaatgagcaacggcaaggtaaagccctggcgttccatctctttggctacgttaaccatttcatccagcgacggggtaatcagaccggataaaccgataatatcgactttttcctctcgcgcagtgcgcaggattttctcggttggcaccatgacacccaaatcgataatttcgtagttattacactgtagaaccacgccaacaatgtttttaccgatgtcatgcacatcgcctttaaccgtcgccagcaggatcttgccggcggtggtgcctttctgcttactggcctcaatataaggttccaaataggccacggcctgtttcatcacccgggcggatttcaccacctgtggcagaaacattttgccctcgccaaacaaatcacccaccacgttcatgccggccattaacgggccttcaatcacttcaatcggtctgtcggcttcctgacgagcctcttcggtatccagttcgataaattcggtaatgcctttcaccaacgaatattccaaccgtttcaccaccggccagcctcgccattccgcctgctgcaccgcaacttcatcacttttgctgccacgaaacttttcggcgatatccagcagtcgctcggtgctgtcattacggcggttcagaatcacatcttcaaccgcatcacgcaattcatcggataaatcgtcgtaaattgccaattgacctgcgttgactatccccatatccatgccgctgcgaatggcgtaatacaggaaaaccgcatggatcgcttcacgtaccgggtcgttgccacggaacgagaaagaaacgttggaaacgccgcctgaaatgagggcgtgaggcagctcgcctttaatatccgcacaggcctcaataaaatcaacggcatagttattatgttcttcaataccagtagcaacagcaaagatatttgggtcaaaaataatatcttccggcgggaagccgacggtttccgtcagcagcttataggcgcgacgacaaatctcgattttgcgcgcgcgagtatcggcctgcccagcttcatcaaaagccatcactaccatggccgcaccgtaacgacgtaccaatttagcgtgatgaataaaggctgcctcgccttccttcatcgaaatcgagttaacaattcctttgccctgaatgcacttaagccccttttcgatcacgtcccatttcgaggaatcgatcatgataggtacgcgggcaatatccggttcaccggcaatcagattcaggaaacgcaccatcgccgcttccgcatccaacatgccttcatccatattgatatcaatgatttgcgcaccgctttctacctgctggcgagccacatctaaagcttcagcgtatttctcttccttaatcagccgtttgaaacgagcagagccggtcacgttggttcgttcgcccacgttgacaaataacgtattggcatcaatggttaagggttccaacccagccagacggcaggcgaccggaatctgcggtaatgcgcgcggcggcatgccagcgacggcttttaccatcgcggcaatatgacgcggcgtagtcccacagcagccaccaacgatattcagaaagcctgatcgcgcccattcagcgatatgctcagccatttctttggcgtccagatcgtattcaccaaaagcattcggtaagccagcgttgggatgagcactaacgtaacactctgaaattctggataactcagccacatactggcgtaactcatccggccccaaagcgcagttcaggccgaatgacagcggttttacgtggcgcaatgaattataaaaagcttcggtggtttgcccggaaagcgtgcggccagaggcatcggtgatggtgccagataccattaccggcagcaccacgcccaaggcttcaaattcggtttctaccgcaaaagttgcggctttggcgttcagggtatcgaacaccgtttcaatcataataatatcgacgccgccctccaccagcgctcgggtggattcgcggtaggcttccaccaattgatcgaagctaacgttacggaaagccggatcgttaaccttgggagaaatagaggcagttcggttagtcgggccaagcacaccggcaacgtagcgcggtttatccggcgttcgggcggtccattcatcggcgcagagtcgggctagtcgggcggcctcgtagttaatctctgccgagagcgactccatttgataatccgccatagcaatggtggtggagttaaaggtattggtttcaagaatatccgcaccggcttcaagataagcattgtgaatggcggtaatcacttcgggcttggagagaaccaatagatcgttatttcctttcagatcgctcggccaatccgcaaaacgttctccgcgataatcggcttcttccagacgatagctctggatcatggtgcccatgccgccatctaatactaaaatacgttttgccagctgctggtgcagtttttctactcgatttgtcactgtcgcctcttcgcctcgatgccctgccaaatatcatcccagcccatatttcagagccgtttaacctatcggaactgctgcaaaagccagcaagccatcctagcacaagttataaggctaatgagtcgacgggaagttgagactttttcaggtagaaatctgcacacatcggatgagcgttttggcccattagcatgcataattataaaacgaaaatgaattccattatatttccagggagctgatttatgacgataccgattcccattaaacggggaaagaaaacaaaggctagtggagctacatcagcagcggctaccggtcaggttcaatcattgactcgcggccttaaattactggaatatatttccgaatcccaaggtcaggttgctctgacggatctggcacaacaggccggtttacctaattcaacgactcaccgcttgctgactactatgcaacagcagggcttcgtacgtcaggtgggagatttagggctgtggaccatgggcgcgcaagcgtttgtcgttggcagcagctttttacaaagccgcaatctactggccatggtacatccgattctgcggcgtttgatggatgaatccggcgaaaccgtcaatctggcggtattggatcacagcgattatcaggcgatcattatcgatcaggtgcaatgtaccgcgctgatgcgtatgtctgctcctattggcggtaagcttcccatgcatgcttccggtgcaggaaaagcgttcttgtcgactctgtcagatgaaaagctggtgcagctactccataaaaaaggtctgcacgcctacacccaacacacccgcacgaatccggtcagtttaaaagagaatttggcgcaaattcgcaagcagggctattccttcgatgatgaagaacatgcgctgggcttgcgttgtatcgctgcctgtctgtatgacgaacatcatgaagccttcgccgctatctctatttctgggccggtttcacgcatcaccgatgaccgcgtgaccgagctaggggcgctggttattcacgccgccaaagaaattacgcaatcctacggcggcggtaatcgctaagtaaaatgcctcactcgcgcgccgctagtggggcaaaaatcaccctataatccgttgtgagaagcgctgcttacgccgataggcgaaaacatcctccacatgcccatgacgaatacgctgttgcaaaccgcgccagtattcagcgtggaataaatcctcgtgcatctcttcaaagcaggctctgacttgcggatcgctgcaaagaaaatggcggaactcttcaggaaaaacatcatttggagaaacgctgtaccaaggctcgctagccatttcgtcctccggatagcgcggcggaggaatatcacggaaattcacttcggtcatataacaaatttcatcgtaatcgtagaaaacgacgcgtccgtggcgcgtgacgccaaagtttttaaacagcatgtcgccggggaaaatatttgctgcggctagctgttttatcgcattgccgtattcttcaatcgcgtcccataactgccgctcattagcctgctccatatagatattcagcggtatcatgcgccgctccatatacagatgcttaatcacaatttggtcgcctaaatcttccagtttttccggcacttccagccgtagctcggccagcagttcctgactgatacgattcttatcgataacaaaattttcaaattcctgagtatccgccatgcgcccaacgcggtcatgctctttaactaactgatagcactcctgcactcgcgcctggctgacctctttttgcggagcaaactggtctttaatcactttgaatacccgatcgaaggacggcaaagtaaataccagcatgaccatgcctttcacccctggagcaacaataaactgctcatcggattgatgcacataggtgagatattcgcggtagctttcggtttttccgtgcttttgacagcctatcgccatatacaattcggcggtagatttgcccggtaaaatttcccttagccattccaccatcgccgctggcaacggggcataaaccatgaaataggagcgagcgaaaccaaacacaatactggcctcggctttgctggtcaggcaggtgtcaataaataatgctgccgattcattgtgatgaatcggcagtaagaacggatgtactccgtcagacaatctgagctttcccactagccacgccgctttattacgataaaacagttcgttggcaatctggaagcgagcggtagccagttgctgcgggctaaatgcctgttggagcgcagcaacgatatattcaatgtctctgggcagattttcccaaggtaaacgaaggggtaaatcattcaatatcgtctgcaacatcgcagataaaccctgctctggcgtaaaatcccgcgccaatggccgtggaatatcgcgaaaacgtcgttccggctgggagctgaaaacaaagagcttgtcctgagttaactcacggtgtttaaacaggcggcaataaaccgagttaaaaaagctttcggctatttcgaaacgtggataatccggcaatagatcggtatagatagcttttacccgcgccagaaattcggcgtcaaaacttccgctgccggtaatgcgttttagttgctccaccaccagtccaacgtggtgatcatagagatgaattcgctttttcatggcttgctgaatcgcttgccagtcggcctgctcaaagcgctgctgagcgcctgcggtcacttccagaaagcggccatactgtgcatcaaaaccctgcaaaatagtttgggcgattaactgctctaagcttattgccatgctcacctcccgctacacggaacagagcctgcatacgcaggctccggttaacaatgattgctagttcggcagtaggattagaactgctgctcttctgtcgatccggtcagcgccgttactgaagattcgccaccctgaatgatattggtcactttatcaaagtaaccggtccctacttcctgctgatgggaagcaaaggtatagccacgatccaccgaggcaaattcaggctgttgcactttctctacgtaatgcttcattccttcgccctgagcataggcgtgcgccaggtcgaacatgttgaaccacatgctgtgaataccggccagcgtaataaactgatatttgtagcccattgcagccagatcttcctggaagctggcaatttgcttatcgctaagattctttttccagttaaaggacggcgagcagttataagccagcaatttacctgggaatttagcgtgaaccgcatcggcaaaacgcttcgccagcgccaagtccggcgtagaagtttcgcaccacaccaaatctgcataaggggcataagccagaccacggctaatcgcctgctcaataccggcgtgagtgcggaagaagccttcggcggtacgttcgccgctgataaattcacgatcgtaaggatcgcagtcggaagtcaacagatccgccgcatcagcatcggtacgagcgatcaataaggtcggtacacccaatacgtccgccgccaagcgcgcagcaaccagtttctgaatagcttcctgagttggtaccaataccttgccgcccatgtgcccacatttcttcactgccgccagctgatcttcgaagtgaacgcccgctgcaccggcttcaatcatggctttcatcagttcaaaagcatttaacacaccgccaaaaccagcttccgcatcagccacaatcggcaggaaataatcggtataaccttgagtacccggctcgatattattcgaccattggatttggtcagctcggcggaaactgttattaatgcgtttaactacggcaggaaccgaatctaccggatataaagactggtccggatacatgctggatgcggtattggcatctgccgcgacctgccaaccggacaaataaatagcttccacaccggccttagcctgctgcaaagcctgaccgccggttaatgcgcccaaacagttgatgtagcctttacgagcgccaccatgcaataaatcccacagtttttgcgcaccgtgctgcgccagcgtgcattccggattgaccgagccgcgcaatttaatcacttcttcagcgctgtaaggacgggtaatcccttcccagcgcgctgatttccagtcttgttccaattgcttgatttgttgagcacgagaggtagtcattgttcttatccttattattaatttgtagggttatgccagcagcgcgtagccaggcagggtcaggaagtcgatcagctcgtcttgtgttgttatacgttccatcaactgagcggcttctttaaagcggccggaatcaaagcgttcggaaccaagctcttgcttaacaacctgcatttcttcactcaacattgtgcggaacaattctttagtgacttttttcccgttactcagggatttttggtggtgaatccattgccagatagaggtacgggatatctcagccgtcgcagcatcttccatcagtccatagataggtacgcagccgttaccggagatccaggcttcaatgtattgcaccgccacgcggatattggcgcgcataccttcttcggttctttcaccagaacagggctctagcaattcagcggcggtaataggtttatcctgtgcacgactcacttccaattgattcggacgattccctaatacgcgattaaatacttccatcaccgtatctgccaaccccggatgcgcaacccaggtgccatcgtggccattagtggcttccaattctttatcggctcggactttatccaacacccaagcgttcttctctgcgtctttactcggaataaaggccgccattccccccatagccaacgcaccgcgcttatggcaggtttttatcagcaggcgagagtatgcgctgaggaaaggttgagtcatggtgacggattgacgatcgggcaaaacgcgatcgctatgattcttcaatgttttgatatagctgaaaatgtaatcccagcgtccgcagttaaggccaacaatgtggtgacgcaggtgatataggatttcgtccatctgaaacactgcaggcaatgtttcgattaataccgtggctttaatggttccctgcggcaaaccaaagcgctgttccgtaaaggtaaagacgtcgctccaccaggcagcttcttggtaggactgcattttgggcagatagaaataagggccactaccattcgccagcaggtgttcataattatgtaagaaataaagggcgaaatcgaacagaccaccagagatagcttctccctgataagtcacgtgtttttcaggtaaatgcaggccgcgcactcgcgcaatcaaaaccgccggatttggttttagctggtaaatcttgcctgattcattggtataagaaatagttcctttcaccgcatcatgcaggttaatttgaccttcaatcactttatcccaactcggtgccagcgaatcttcaaaatctgccatgaagactttcacattagcattcagcgcgttaatcaccattttgcgctctaccgggccggttatctcaacccgacgatcctgtaaatcagcagggatattctgaattttccagtcaccattgcgaatggaagtggtttccgaaataaagtccggcaatccgccattatcaatgccatgttgccatttctcgcgtgcagcaaggagttgacagcgacgttctgagaattcagcaaccaattccgttaaaaactcgatggcctgagcggtcaatacctgacgctccgcagtggaaaacttctgcgtgaagactaactccgtgcctactaactgttgtgtcattaccctttcctcatcccaatctgacggcatatacaccaacgcacaagcggcgtacttaccgcctgagacgcattttatgagtcattggcggcaagattttctggtcgtttttcaccccaacagaattaagaataatcaattaatcatgaaaatcaaaaacgatttccatttttatattaaatatttatttaatctttatttatcaattgattaacacaaataacaaaatacacacttcaggaaaggcattccataaatgacaaaattccgttgtaacatattgtttaatatagagattagaccagttggaaagggattgtttatgcagaatagcagaagaaatggttaggcggcatcgattcagccgccatataaagatgaaatcagtcgagagtcgggttcatttgacgtagatcgaacggcgtaatctgatagacataataattgagccaattggcaaataataagtgtccatggctacgccatgaggctaatgggcgctgcgtaggatcattctgtgggaagtaattcagtgggacagcaggttccagacccgcagcccgatcccgcgcatattcccctgccagcgtatccacatcgtattccggatggccggtaacgaaagcgactcttttatccttactggcaaacagataagcaccggcctcatcggaagccgccagaatatccagatcggtgtattgctgcaaaatctcaatcggaaaatctgcataacgggaatgaggggcaaagaagctttcatcaaaaccacgggtcaataacgccaaaggtttcagggtttgatggcgataaatcccagacaatttttccttacgagttagtttgggaatcccatagagaatgtttaaggcggcctgcactgcccagcagacaaatagcgttgatgtcacatgatccttggcccaggtgataatgcgttctatctgcggccaataggcaacatcgctgaaatccactaacccaagaggagcgccggttacgataagtccatcaaaattctgatttttaatctcttcaaaatcgcaatagaagttattcagatgctccgctggcgtatttttcgattcgcggctatccactcgtagcaattgaatatccacttgcaggggcgagttcgacagtaaacgtaaaaactgattttccgtttctatcttcttaggcattagattcagcaccaatacttttagcggtcgaatttcctgagttttagctcttgatgaagtcatcacaaaaacattctcattacgcaagaaactcaccgcaggtagttcatcagggacccgaattggcatgcctacatcctcaatatatccgtttatacgtttagacttccagacacctgaagataactttttccaaatacaaagtcgagtgatcaacaacaacctgaaaatgtttcattgcggtattaaaccaatgcgctgctgtcctttacttccgcagcgcggcctcgcatttagcctgattgcaaaatcaccctcaatgataggaacaaataaccaaaaaacataaatattatttagctattggcgcaccagtgaaattggttaacatcgtataaagctgactaatcatgcatattaacaacaataaatagacaaaatcagtgagttatggtgattatgttggcaatattgcatcatcaaaggcgatacagccactcaatatcctagcaccggattaattaaaataattaatgcagttattctgggcgccagagagtgactcgttacttataaaaccaaggaagtattaagatctcaccaatggctctattttataaaggtttatatttataaggttgctagattgtggcgacaagtgacgccgataaatcgaggaaactactcagagagtactatatagatttagagaaagttaaaataggtgcgtattactgctgatattttgacaaatttcagatacaaaaaaggccatccgttaggatggcctcgtttgtttatttgatacctggcagtgtcctactctcgcatggggagaccccacactaccatcggcgctacggcgtttcacttctgagttcggcatggggtcaggtgggaccaccgcgctattaccgccaggtaaattcttttctaagtgccgaacttaaacccatataactggtgctgatacccagagtcgaactggggacctcacccttaccaagggtgcgctctaccaactgagccatatcagcacaactaaatttgatgcctggcagtgtcctactctcgcatggggagaccccacactaccatcggcgctacggcgtttcacttctgagttcggcatgggatcaggtgggaccaccgcgctattgccgccaggcaaattctgtttcaatcaacccgccacgtgatttacaccacacagccagtcaatccaatctgttaacaatgctgaaaatcaaaacgctctctaaaacaccttcggtgctgtaaggttaagcctcacggatcattagtactggttagctcaatgcatcgctgcacttacacacccagcctatcaacgccatagtctttaacgttccttcagggggcttgaagccccagggaagactcatcttgaggcaagtttcgcgcttagatgctttcagcgcttatcttttccgcatttagctaccgggcaatgccattggcatgacaacccgaacaccagtgatgcgtccactccggtcctctcgtactaggagcagcccctctcaatcttccaacgcccacggcagatagggaccgaactgtctcacgacgttctaaacccagctcgcgtaccactttaaatggcgaacagccatacccttgggacctacttcagccccaggatgtgatgagccgacatcgaggtgccaaacaccgccgtcgatatgaactcttgggcggtatcagcctgttatccccggagtaccttttatccgttgagcgatggcccttccattcagaaccaccggatcactaagacctactttcgtacctgctcgagccgtcactctcgcagtcaagctagcttatgcctttgcactaacctcacgatgtccgaccgtgattagctaaccttcgtgctcctccgttactctttgggaggagaccgccccagtcaaactacccaccagacactgtcctcaccccagattatggggccgagttagaacatcaaacattaaagggtggtatttcaaggttggctccacgcagactggcgtccacgcttcgatgcctcccacctatcctacacatcaaggctcaatgttcagtgtcaagctatagtaaaggttcacggggtctttccgtcttgccgcgggtacactgcatcttcacagcgagttcaatttcactgagtctcgggtggagacagcctggccatcattacgccattcgtgcaggtcggaacttacccgacaaggaatttcgctaccttaggaccgttatagttacggccgccgtttactggggcttcgatcaagagcttcgccttgcggctgaccccatcaattaaccttccagcaccgggcaggcgtcacaccgtatacgtccactttcgtgtttgcacagtgctgtgtttttattaaacagttgcagccagctggtatctgcgactggcttcagctccgagagcaagtctcttcacctagcgccagcgtgccttctcccgaagttacggcaccattttgcctagttccttcacccgagttctctcaagcgcctgagtattctctacctgaccacctgtgtcggtttggggtacgatttaatgttacctgatgcttagaggcttttcctggaagcttggcatcaactacttctgcaccgtggtgcatcgtcatcacgcctcagggttgatggttttccggatttaccaggaatacccccctacacgcttaaaccgggacaaccgtcgcccggctagcctagccttctccgtccccccttcgcagtaacaccaagtacaggaatattaacctgtttcccatcgactacgcttttcagcctcgccttaggggtcgactcaccctgccccgattaacgttggacaggaacccttggtcttccggcgtgcgggtttttcacccgcattatcgttacttatgtcagcattcgcacttctgatacctccagcagtcctcacagactaccttcaacggcttacagaacgctcccctacccaacaacacctaagtgtcgctgccgcagcttcggtgcatggtttagccccgttacatcttccgcgcaggccgactcgaccagtgagctattacgctttctttaaatgatggctgcttctaagccaacatcctggctgtctatgccttcccacatcgtttcccacttaaccatgactttgggaccttagctggcggtctgggttgtttccctcttcacgacggacgttagcacccgccgtgtgtctcccgtgataacattcttcggtattcggagtttgcatcggtttggtaatccgggatggacccctagccgaaacagtgctctacccccgaagatgagttcacgaggcgctacctaaatagctttcggggagaaccagctatctcccggtttgattggcctttcacccccagccacaagtcatccgctaatttttcaacattagtcggttcggtcctccagttagtgttacccaaccttcaacctgcccatggctagatcaccgggtttcgggtctataccttgcaactagacgcccagttaagactcggtttccctacggctcccctatacggttaaccttgctacaaaatataagtcgctgacccattatacaaaaggtacgcagtcacaccacgaaggtgctcccactgcttgtacgtacacggtttcaggttctatttcactcccctcgccggggttcttttcgcctttccctcacggtactggttcactatcggtcagtcaggagtatttagccttggaggatggtccccccatattcagacaggatgtcacgtgtcccgccctactcatcgagttcacagcatgtgcatttttgtgtacgggactatcaccctgtaccgtgcgactttccagacgcttccactaacacacaaactgattcagactctgggctcctccccgttcgctcgccgctactaggggaatctcggttgatttcttttcctcggggtacttagatgtttcagttcccccggttcgcctcgttagactatgtattcatctaacgatagtgcaacgaattgcactgggtttccccattcgggtatcgtcggttgtaacgcttcatatcagcttaccgacgcttttcgcagattagcacgcccttcatcgcctctgactgcctaggcatccaccgtgtacgcttagtcgcttaacctcacaacccgaaggtgtctttcgacatcatcgtgctgcgattattgagagactctacctgcaggtgactccttgtctcggtaaatctacggagagacaagttttagctgcagtgtttcaattttcagcttgttccagattgttaaagagcaatatttcacaacatactgtccaccttgcggcagcaatatattttgaaatagttttatatggtggagctaagcgggagcgaaccgctgacctcctgcgtgcaaggcaggcgctctcccagctgagctatagccccatataaaaagcaaataccttattgctgcaactcatgtccagacaaggcgcagacacgcacgtttattgttataaacgaatgtgacggtaacgcactacagggatgagttggtgggtctgagtggacttgaaccaccgacctcacccttatcaggggtgcgctctaaccacctgagctacagacccaacaaggtactaaagcccgactaatctctcagcccggccttatttgctcgttactttctatcagacaatctgtgtggacactgcgcaatgcgtatcattaggtaaggaggtgatccaaccgcaggttcccctacggttaccttgttacgacttcaccccagtcatgaatcacaaagtggtaagcgccctcccgaaggttaagctacctacttcttttgcaacccactcccatggtgtgacgggcggtgtgtacaaggcccgggaacgtattcaccgtagcattctgatctacgattactagcgattccgacttcatggagtcgagttgcagactccaatccggactacgacagactttatgtggtccgcttgctctcgcgagttcgcttcactttgtatctgccattgtagcacgtgtgtagccctactcgtaagggccatgatgacttgacgtcatccccaccttcctccggtttatcaccggcagtctcccttgagttcccaccatgacgtgctggcaacaaaggataagggttgcgctcgttgcgggacttaacccaacatttcacaacacgagctgacgacagccatgcagcacctgtctcacagttcccgaaggcaccgaagcatctctgctacgttctgtggatgtcaagagtaggtaaggttcttcgcgttgcatcgaattaaaccacatgctccaccgcttgtgcgggcccccgtcaattcatttgagttttaaccttgcggccgtactccccaggcggtcgacttaacgcgttagctccggaagccacgcctcaagggcacaacctccaagtcgacatcgtttacagcgtggactaccagggtatctaatcctgtttgctccccacgctttcgcacctgagcgtcagtctttgtccagggggccgccttcgccaccggtattcctccagatctctacgcatttcaccgctacacctggaattctacccccctctacaagactctagcttgccagtttcaaatgcagttcccaagttaagctcggggatttcacatctgacttaacaaaccgcctgcgtgcgctttacgcccagtaattccgattaacgcttgcaccctccgtattaccgcggctgctggcacggagttagccggtgcttcttctgcgagtaacgtcaatcacttcacgtattaggtgaaatgccttcctcctcgctgaaagtgctttacaacccgaaggccttcttcacacacgcggcatggctgcatcaggcttgcgcccattgtgcaatattccccactgctgcctcccgtaggagtctggaccgtgtctcagttccagtgtggctggtcatcctctcagaccagctagggatcgtcgcctaggtgagccattaccccacctactagctaatcccatctgggcacatccgatggcgtgaggccctaaggtcccccactttgctcttgcgaggttatgcggtattagctaccgtttccagtagttatccccctccatcaggcagtttcccagacattactcacccgtccgccgctcgccggcaaagtagcaagctactttccgctgccgctcgacttgcatgtgttaggcctgccgccagcgttcaatctgagccatgatcaaactcttcaatttaagatttgtttgatttgctaccgaagtagcgatgctcaaagattactttctgcaaatatgcattcgaaccgaagttcaaatgttcactgctttggtcactcttcaagacttgatatttcttctgcctgccgaaacaggctttgatatcgtcttgcgagtgcccacacagattgtctgataaattgttaaagagcagtgagttagcaacctttcggtgggtaactcgaggtgcgcatattacgctttcctcactcagagtcaactacttatttcgttgaatttctctgttctctttgccggccactcagttacttgattcgctgtgtgccgtctcgatggatgcgcattatagggagtcgaattttttgcacaactcttttttcgcctttttctactgtttgaatacttttcgctccttacgggtagatcttgcacgatctccgccattttcggctcgatccaaccggctgtctggttgtaattccaccagcaaaggatagtattgccagtaaattatgatcttattacggggctttgttatgtctgattctattcgtcgttacctaaattacactccgatccttggccagaaggtaatgatcgataaatcgagcgtagtgatcggcaatgttttgctcggtgatgacgtcagcgtgtggccgttagttgctattcgcggcgatgtaaatcaggtcaaaattggtgctcgcaccaatattcaggatggaagcgtcttgcatgtcacccatcagtccgaatacaaccctacaggtcatcctcttatcatcggcgaagacgtgaccgtcggacataaagcgatgcttcacggctgcacgattggtaatcgcgtattagtcgggatgggttcgattctgctggatggcgcggttatagaagatgatgtgatgattggcgctggcagtttagttgcgcccggtaaaagattagtcagtggttacctttatatgggaagcccggctaagcagattcgtccgttaacccccgcagagctggaaggattgatttactcggcaaacaactatgtacgttggaaggatgattacctggctgaagaaaagtaataccccccttcttgttctctatctatatagagggaaacaatagactccctctatatagacatatatctgatgcctaaataaaacgacacctatgccaatcagtggccgagttcttcgctcaaaagcgctaataccggcgtaatctccggcatcacgccatgccaaagataaaacgcatgcgccgcctgccctaccaacattcctaaaccatcagcatactgcgttgctcccaacgcggaggcccaagtaaggaagggcgtatctccctgttgataaaacatatcgtaacaacgagtgtttggggcaataagagaagcagggagtgcgggaacgtcgccatgaatgcccgaagctgtagcattaataacaagatcgaagcactgcccttcaagatctgccatttctactgcttctatttcgccaaggtgcctaaacacttcggataactgctgcgcccgactaaaagttcggttagtaataacaatcttacaaccaaaagaaagcagaggcaggataacgccacgcgcagcgccaccggcaccgaccagcaggatacgatcctgcggcttgatcagctccaaacgttccagatcgctgagcaaaccgataccatcggtgttatctccgagtaagcggccatcttccaaaacctttaaggtattcaccgcaccggcaaattcggcacgctcagttaactccgccgatgctgcataagcccgctctttaaatggcgtggtgatatttgcacctttcgccccctgagcaaaaaacgtagccagcgttgtttcgaactcatcatgaggagccagcaccgttccgtaatgatgctcaatacccgtttgggcggcaaaaagggcatgtattcgcggcgacttactatgggctatcggattgccaaaaactgcaaacggttgttccactctctttccttaaccttgacggaaacgctcaccggtgagggcatcacgaatttcagatggatttaaacgcccgcccaccagcccggacaatactgccagatcggttccaagctgctttcgaacctcttcttccgtacggcaaggctctaacccactgaggttcgcgctggttgaaaccagaggctttccataataggtacacaactgttgcactaagggatggtcgctaacccgaacggccagagagtcaaagtgccccgtcagccaacgaggcgtcgttttcctggctggaataacccatgtcaccggaccgggccagctggcaaatattgttgcgcgttgcgtttcatctaactgcgagtcatcaatataaggcaagagttgctcataatttgctgcaatcagaatcagccctttctgccagggacgctgttttaacgccagcaaagcatttaccgctttttcactatcgggatcgcaacccaggccgaatacagcctcagttggataggcaataacgtcttcttgctgcaaagcttgcagtacaccttcaaaaagggagatatcttctttacacatgggttcttactcgattgccactggtttcccacataatttgctagcacaaaaacgcttcacgccctgcgcagtgcgtttttccattagaagcgggtagtggcaatgggcacattctccggctataggttgctgattaagcgcaaattggcagtcaggatagcgattacaagcgtgaaaaacctttccaaaacgggatttacgttgcaacagttttcccttaccgcattgtgggcaagtaatagatgtttcatctggtttatcgataacttcggtatggtcacattcaggatatttgctacagccaataaacataccgtagcgcccttgtcgtaacaccaataccgcctgacacttcggacattcctgcccttccaacactttaactatgtgtccgtccgcctgcgcctttaacggccgcatatattggcattcggggtaatgagaacaaccaagaaacgggccatgaccaccgcggcggatcactaatgctgacccacactcagggcaggacccattatccttcgcagttgcagtttttgtcataacgctttctctaatcgattaatctgcgccgatattaccacctagtgcagataaccctcattaacttcaaagagcaattcttccatctgttgataggcattttcatattcaggcacgttgaacagcaccatcagcaccacccatttaagatcttccagatcaaactcggctgaatcgagcgccataatacgatcaataaccatttcgcgggtatcgagttttagcacattaatttgttcgaggaataggataaaaccacggcattcgacgtccaacttcatgatttcttcaggagtatagatacgaagcgccaaaggatcggcactgtactgataaggcgctatttcaccttcctgtaaatcagccaacgcctccagccaattcaaggcgttatagatgtcttcacgatagaaacccgcatccgctagatcgtcagtaattttgtcctgatcggcgagcatttcggtgtcgttatgcatgtatgtttcaaataggtacatcaaaacgtcgaacatggcctgccctccttattcggacatagccgccgggtacagctgcgatccaccctgctaactccagctcgagtaatttcactacgatttctggcacagtatggccggcacgttcggcgacgacatcaatgggtgtcacctcatattctacgttagccaacacatcaggaaatggcaattcaagttgcggttctggcgcagaaataatttcttccataggcaaaggtagccaatgtaaggaactccccagctgctcaatgacctcccgcggatggcaaaccaggttcgctccttgctgaatcagccagtgtgtcccttcactcccagagctatcgagtgagccgggtagagagaaaacttcccggccttgctccaaagcataccgagccgtaatcaaagagccacttttacgcgttgcttcaatgacgatcacccccgcgcttagcccacttataattcggtttctccgagggaaatgagcggcaataggtaatgccgtagataaaaactcagaaaccagcgcaccgccatttgcctcaatttcttgcgccaatcgtccgtgccgcttgggataaatattggcaagcccactccctagaaccgcaatagttttaccaccgcaacccaatactgcctgatggcaaataccatcaattcctaacgccaacccgctagtaatcgccaggccactttgagcaagttcagcagcaaaataacgcgcccaacgctctccgtaatggctgtaactccgactgccaaccatcgctatctgcgatgcaagtaatagctctttatttccagaaacaaacaacagcaaagggggcgataaaatcgccattaactgcgctggatagccaggctgaccatagaccagtaaatggtggccaggttgttccagccaggataacgtcttctcgatataacgcgggtttaggctccaaaattgttgaatttgtttatcataaagccccgatttccgtagggcttctgcgctgatatcactgagttttagcaacccaatccctagtaagcgacttttgctggtatcaagcccctgaactccattgatccttagccatagctccgttgctaacattccccctccctggcggatttgtctgtcaacaccaatttgttcaattggtagtcgatgctgtcaatcggagccaaaaatgtctagaatagagactgaatatcattcaccaatcggacgcagatctagatatttatgtcagtattacaggtgttacattacccagacgaccggctgcgcaaagttgctgcgccggtaaaagaagtcaatgcagaaatccaacgcatcgtggacgatatgttcgataccatgtacgcagaggaaggcattgggcttgccgctacgcaagtagatgtccatcagcagattatcgttatcgatgtttctgaaaaccgcgatcagcgcctggtcttaatcaaccctgagctgctggaaaaaagcggtgaaaccggtattgaagaaggctgcctctctattcctgagcaacgcgccctggttcctcgcgcagaaaaagtcaaagtcagagccttggaccgtgatgggaaaccttttgaactggaagcagacgatctgttagcgatctgtatccagcacgaaatggatcatttggttggcaaactgttcgtggactatctgtcgcctctgaagcgtcagcgtatccgccaaaagctggaaaaactggctaagctcaacgcgcgcgctaactaatccttttttatgcaggaaaccaaacgtgtctgattcattgcggattatttttgccggaacgcctgattttgcagcgcgtcatcttgacgcgctactttcttccaagcaccagattatcggggttttcactcaacccgatcgccctgctggccgaggtaacaaactcactccaagcccggtaaaggttttagctgagcaacacgatattcctgtttttcagccaaaatctctgcggccagaagaaaatcagcatctggtagccgatcttaacgccgatatcatggtcgtggtggcttatggcctcatcctgccaaaagcggtgttggatatgccacgtttaggttgtattaacgtacacggttctctgctgccccgttggcgtggagctgcgccaatccagcgttcactctgggctggggacaaagaaaccggtgtcactattatgcaaatggacgtcgggttagataccggcgatatgctgtataaaattgcctgcgatatacagccggaagataccagcgcgagcctatacgacaaactcgctgaacttgggccacagggtatgctggccacgctacaactgttagcggaaggtaaagccaaaccggaagtacaggatgaaagtctggtgacttatgcggaaaaactgagcaaagaggaagccagactgaactggtcactttctgctgctcagctagaacgctgcattcgcgcctttaatccctggccggttagctattttgtcatcgacgaacagccgataaaagtttggcaagctcatgttctacccgcggcatctaatactttacccggcaccatagtacaggcggataaacagggtattcaggtggcgacggctgacggcgtgctgaatattactcagttgcagccagcagggaagaaaccgatgtcggcggcagatttgctcaattcgcgacgcgaatggtttaccgtcggtaatcagttggcataaccgacgaattttaacaacgacttcatcgcccgatacttcactatcgggctattctttccctttattttgctgacatttgtcagcttttttggctatgaaaaacacatataacctccgcagcatcgctgccaaagcaattagccaggtactggatcaagggcaatctctcagcaccgtccttcctggtctccagaaaaatatctccgataaagaccgcgcgctgttgcaggagttgtgttttgggactttacgcgtgctgccgcagctggaatggtgtattcagcagctaatggcacgtccgatgacgggtaaacagcgggtctttcattacctgatcatggtgggcatttatcaattgctgtacacccggatcccacctcatgcggctttggctgaaacggtagaaggcgccgtagccctaaagcgaccacagcttaaaggtttgattaatggcgtattgcgccaattccaacgccagcaggtagagttgttggaacgcgcagccaatcatgacagccgctatttgcatccaagctggttactggctcgaattaaaaaagcctacccggagcaatggcagcaaatcatcgatgccaacaatcaaaaaccgccgatgtggctgcgcgttagtcgcttacaccatagccgagcagattatctggaattgatgcaacaagcgggtattgaagcggaacctcacgctgaatacgccgatgccgttcgtttgatcactccatgtgcggtaaacgatctgcctggttttgctcagggttgggtgacggtgcaagacgcctcagctcaaggctgcgttgatctgctcgatccgcagaacggcgaacagatcctcgatttatgcgctgcacccggcggtaaaaccacccatattctcgaagccgctcccaaagcgcacgtattggcggtagatattgatgaacaacgtcttagccgcgtaaaagaaaatctgcaacgcctgcaactgaatgcggtggttaaggtcggtgatggtcgtacacctgatgactggtgcgaagataagctattcgatcgtatccttttggatgcgccttgctctgccaccggcgtgattcgtcgtcatccagatatcaaatggctgcgccgtgacagcgatattgccgatcttgcccaattgcagtcagaaattcttgaggctatttggcctaagctgaagaaagatggcgtgatggtttacgcaacctgctcaattttgccggaagaaaaccaacagcagatcgccgcattcttgcagcgccatccggaagcgcgtttagtagaaacaggctcagcggctcatcccggtaaacaaaaccttcctcacccggaagacggtgatggcttcttttacgctaagctaattaaaagctaatcaaacctcagagtagcggttattgttaggccttcgggcctactttcagggtaaacagagaacgcgatgaaaataattattctcggtgcgggacaggttggcgggacgctggcagaaaatttggtcggtgaaaacaacgatattaccgttgtggataccaataccaatcggcttcgtcaattacaggacaagttcgatctgcgcgtagtacaaggtcacggttcgcacccacgggtgctgagagaagccggcgcagaagatgcagatatgctggttgctgtcactaactccgatgaaaccaacatgatcgcctgtcagatcgcctactcattatttaatacacctaaccgtatcgctcgtattcgctctcctgaatatatccgtgaatctgagaagcttttcctaccggaagctgtcccaattgatcatcttatatcgccggaacagttagtaatcgattatatatataagctgattgaatatcctggcgcacttcaggtagttaattttgccgaaggtaaggtcagtattgccgcagtaaaagcttattacggcggtcctctggtgggcaatgccttatcttcactacgcgaacatatgccgcatattgatacgcgagtcgcggctatatttcgtcaagaccgacctattcgtccacagggttcaactattatcgaagccggtgatgaagtcttttttgtcgccgcctcccagcacattcgcgcagtaatgagtgaattacagcgactggaaaaaccctataagcgaattatgattgttggcggtggtaacgtcggcgccggattggcattacgattagaaaaagactacagcgtaaaattaattgaacgtgaccagcagcgagcggctgaattagcggagatgctacacgacactatcgtattttacggtgatgcctcagatcaggaattattagccgaagaacacattgagcaagtcgatgtatttattgccatcaccaatgatgacgaagctaatattatgtctgccatgctagccaaacgtatgggggccaaaaaagccatggtgctcattcaacgcagtgcttatgtagatttagtgcaaggcagtgtaattgatattgccatttcaccacagcaagccacgatttccgcactgctcggccatgtgcgcaaagcagatattgttagcgtgtcttcactgcgacgcggcgtagcagaagctatcgaagctgtcgctcatggtgatgaaagtacatctaaagtagtaggacgagtggttgaagatattaaattaccgccgggtactacgattggcgctattgtacgtggagatgaagtgcttatcgctaatagcagctcggttattcaacaaggtgaccacgttgtaatgtttattaccgataaaaaattcgttcctgacgttgaacgcttgttccaaccaagcccattcttcttataaggctataatcttaatttcagggacgagtgaattaattaaaactattcccatgggaaaggatgaaaaatttcctataattcttgaggtacagggatttctgttagttaagattgtttcgtttaattttgaaggggtgttgctatgagctttatgaaagaatttcgtgaatttgccatgcgtgggaatgtggttgatttggcggtcggtgttattatcggtgccgctttcgggaagattgtttcctcgctggtcgcagatattatcatgccacctctaggactgttattaggcggcgtggacttcaaacaattccatttcgtactacgtgaagcccaaggtgcgattcctgcagttgtcatgaattatggttcatttattcaaagcatttttgatttcgttatcgttgcactggcaatcttctctgcaattaagctgatgaataaaatgcgtcgcgaaaaagcagaagaaccagcggtaccaccggcaccaactacggaagaaaagttattagccgagattcgtgatttattaaaagaacaacaaactaaataatcacgatttcagtacgtcaaaagccatcgtaagatggctttttttattccttaaaaccagaaggccagtggtaaagaatctgctgattgtttgccactggcctcccagttaccgcctttcgcgtgttttgttttacgctgatagctgcctttccctttactatttttctctattcgctgcctgaacagtgggtcatgtaacaatgcttccagagcattatctttaattttgcctttagtgtgacggtaagtagtcatggtagatcctcattgtaataaacattgtttgaaaaacgttcgaatcatactgctgttcgtccagtaatgaaataactaggcaaacaaatttagtttcgcgaggtttcgtccgtagcgccttgctccagcgcttctaagatcgaacagtaagtgctggtatggtggctaccgcaacaggcatcgcttaaacgtttgagagattcccgcattttctgcaattctttaattttcccctcaacttcactgagtctggaatcgacgatcgatttggattcctgacatgtatgatgctcaggatcgactcggatcgataatagttccgcgatcgtctccagagtaaaacctaactgtttggcatatcggataaagcgtaaacgctgtaaatcctgttcattatataagcgataaccgccttcagtacgaatgccatgttccatcattccctgtttttcataatatcgcaccgtatcaggtgtgacatcggccagcttggccaattgacctattttcaacatcctgattctccagacagtttttcggataatggcagctgataatcaccgtgcaaaaaatcggtattcaatcccgcttgtttcaacttcagttcgagtaaacccagccgcttcgataatttctgatactccgcttcattgtgatctaattgcgcgagtagatgaataatagtcagtgcttcttgccgatcttgtaactcgacgggaatatagccagcattcttcagaattcgataactgaccctaagctcagtaggaatatgagtatcatcatcaagttccaggggcacaccaaaaccgggcaaattttcaagttcacctttttttgcgcatccattatgtgcctttcagcccattcatcaattaatgacatacacgtagttcccagctttaaccgatatacatagcataacgcattaggatgcagataataagcgagggaaataatcacgaagaacggctaagacggtcttattttgggcagggctgtcaatagacgtaaaaaaaccgggcaagcccggtttttttacgcgttcacagattactctgcagctactacttctgcttcagacgcagcacgatcaaccagctcgatgtaagccatcggagcgttgtcgcctgcacggaagccacacttaagaatgcgagtgtaaccaccggcgcggctcgcgaaacgcgggcctagctcgttaaacagttttgccacgatctcgttatcacgagtacgggcgaatgccagacgacgattagcaacgctgtcggtcttggcaagagtaatcagcggctcaacaacgcgacgcagctctttcgctttcggcagggtcgtcttgatgatctcatgacgaaccaaagagccggccatgttacggaacatagcctggcgatggctgctgttacggttcagttgacgaccactcttacgatggcgcatgaccttatccttctcagtaaaaccttaacctgtgatccggttactcgtcagcaatacttgctggcggccagttttccaggcgcatgcccagagacagaccacgtgacgcaagcacgtctttaatctcagtaagagattttttacccaggttcggcgttttcagcaactcaacctcggtacgctgtaccagatcaccgatgtagtggatagcttctgccttgaggcagttagcagagcggacagtcaattccagatcgtcaacagggcgcagcaagatcggatcgaactctggcttctcttctttgacttccggctgacgtacatcacgtaggtcaacgaaagcttcaagttgttcagccaagatagtggccgcacggcggatcgcctcttcaggatcgatcgtaccattggtttccatctcgatgaccagcttgtccaagtcggtacgctgttctacacgcgctgcttcaacattgtaggcaatacgctctacagggctatagcatgcgtctactaacagacgaccaattgggcgctcatcttcttccgaatgaattcgggcagaagccggcacataaccacgaccgcgctgaactttgatacgcatgctaatagatgcgttttcatcggtcaggtggcagatcacgtgttgcggcttgacgatttcgacatcaccatcatgggtgatatcggctgcagtcacagggccaatgccagacttattcagggtaagaataacttcatcttttccttgaactctcaccgccagccctttcaggttgagcaggatctccaggatatcttcctgtacgccttctttggtgctgtactcatgcagtacaccatcaatctcaacctcggtcaccgcgcaacccggcatagatgaaagcagaatacggcgcagtgcgttgccgagagtatggccaaagccacgctctaacggctcaagggtcaccttggcgtgcgtcgaactgacttgctcgatatctaccaggcgcggttttagaaactctgtcacagaaccctgcattgtgtcctctctttggtactaagctttacttggagtaaagctcgacgatcaggtgttcgttaatgtccgcagacagatcagtacgttcaggaatacgtttgaacacaccttccatcttaacagcatcaacttccagccaagtcggcttttcacgctgctcagccagctccaaagctgccttcacacgagactgctttttagctttctcacggatgctgactacgtcattcggagatacctgataagaagcgatgttaacaacgcgaccatttaccatgatagctttatgactaaccagctgacgtgattcagcacgagttgcgccaaagcccatacggtaaactacgttgtccagacggccttccagcaattgcaacaggtttgcacctgtgttgcctttcagacgtgctgcttctttatagtagttacggaattgacgctccagaacaccatagatacggcgaactttttgtttttcacgtaactgcacaccgtaatcagacagacgcggtttacgcgcaccatgctgaccaggtggttgttcaatcttacacttggtgtcaatcgcgcgaacgccagacttaaggaacaggtctgtgccctcacgacggctcagcttgagcttaggacccaaatatcttgccattttctctctccaacaaacctaaaagcaacgttatacgcggcgctttttcggcggacgacaaccgttatgaggaatcggagtcacatcagtaatattagtgatgcggaaaccagccgcgtttaacgcgcgaatagttgactcacgaccaggaccaggtcctttaaccataacttccaggttcttaataccgtattctttcactgcttctgcgcagcgctctgctgcaacttgcgctgcaaacggagtagatttacgagaaccacggaaaccggaaccaccggctgttgcccaacccaaagcgttaccctgacgatcagtaatggtaacgatggtgttgttgaaagaagcatggatatgagccacaccgtcagagactgtctttcttacacgcttgcgtgcacgaataggtgcctttgccattattcaatcaccccgattatttcttgatcggtttacgcggacccttacgggtacgtgcgttggtcttagtacgctgaccgcgaactggtagaccacgacgatgacgcaaaccacgataagtcccaaggtccatcagacgcttgatgctcagggtcacctcacgacgcagatcaccttctacaacgtacttggcaacttcgtcacgcagcttctcgatttgctcttcagacagctcactgatcttaacattttcagcaatacccgcagcgacacagatagcctgtgaacgggtcttaccgataccgtagatcgcggttaaagcgataacagtatgtttctgatcaggaatgttaatgcctgctatacgggccactatgcactcctactattttatacggcaataccattctgaaaagcccgttttcaggatactcaaatagcattgctgtcacatacaaaagattggctggctaatctagccagctcaacccaactttgcaagaaaaatatgcaagataaatcagccttgacgctgtttatgctttggttcggcactgcagattacgcgaacgacaccgttacgcttaacaattttgcagttacgacataatttcttgacggaagcacgaactttcatttttactctccgtaacttctcaaacatatctgattagcgattatagcctttcagatttgctttcttcaatgcagactcgtactgactcgacatcattagagtttgcacttgagccataaagtccatgatgaccacaactacgattagtagtgaggtaccaccaaagtaaaatggtactttcatcgcgtcacgcatgaactccgggatcaggcagatgaaagtaatatacatcgcaccaattaaggtcagacgcgtcattactttatcgatgtacttcgccgtttgctctcccggacgaattcctggcacgaatgcaccggacttcttcaggttatctgctgtttcacgcgggttaaacaccaacgccgtgtagaagaaacagaagaagatgattgcagacgcatagagtaacacataaagcggctgtcccggctgcaaatacatcgaaatagtcgtcagccagttccaacctgtcccgcccccaaaccatgatgcaatcgtggcagggaacagaattatgctggaagcgaagattgcgggaataaccccagccatattcactttcaacggtaagtgtgtgctctgtgctgcataaacacgacgaccctgttgacgtttcgcatagttaacgacgatacgacgttgaccacgttcaatgaaaacaacgaagaaggttactgcaaacactaatactgcaaccaacagcaacaggaggaagtgcaggtcgccttgccgagcttgctcgatggtatgaccaactgccggcgggagacccgcgacaataccagcaaagattatgattgagataccgttaccgataccgcgttcagtaatctgttcacccagccacatcaggaacatagtcccggtaaccaggctcacaacagcggtaaaatagaaggcaaagcctggatttaataccagaccttgcatcccaggcatattcggcagaccggtagcaataccgatcgactggaatatagccaataccaacgtgccataacgggtgtactggctaatcttacgacggccagcctccccttctttctttatttcagctaacgctggatgaaccaccgtcagcagctggataataattgacgccgaaatatacggcataatacccagggcaaagatcgaagcacgactgagagcaccaccagagaacatgttgaacatttcaatgatggtgcctctctgctgctcgagcaatttggcaagcacagtggcatcgataccaggaatcggaataaaagagccgatacggaaaacaataagcgcaccgataacaaacaaaagtctgcgcttcagttcgcctaatccgcctttagcactttgaaaatctaatcctggttgcttagccatctgctacttattcctcaattttaccgccagcagcttcgatagcagcacgagcgcctttggtgacacgcagaccacgcagagttaccggacgagtgacttcgcctgaaagcataactttcgcgaattcaatctgggtaccaacaacgttagcggctttcagcgtgttcaggtcgattacgtcgccttccactaaagccagttcagacagacgaacttctgccgtgatcattgctttgcgagaggtgaagccgaatttcggcagacgacgatataacggcatctgaccaccttcaaacccacgacgtacgccaccgccagaacgtgagttctgacctttgtgaccacgaccagcggttttacccaggccagaaccgataccacgacctacacgcttaggcgcatgcttggcaccatcagccggagacagagtatttaaacgcatctgttactcctcaactttaaccatgtaggaaaccaagttgaccataccacgcacagcaggagtatcctcacgctctacagtatgaccaatacgacgcagacctaaaccgagtagagttgccttatgctttggcaaacgaccgatgctgctttttgtttgagttactttaatagtctttgccatggttatttccctagaatttcttcgacggacttaccacgcttggcagcgaccatttctggggatttcatatcttccagagctgaaatagttgcacgaaccacgttgatcgggttagtggaaccataggctttggccaatacgttatgaacccctgcaacttccagaacggcgcgcattgcaccaccggcgatgataccggtaccttcggaagctggttgcatgaatacgcgagaacccgtatgagcacctttaacagggtgctgcagagtgccgccatccagagcaacgttaatcatagcgcgacgggctttttccatcgctttttggatcgctgctggaacttcgcgtgctttgccgtagccaaaaccaacgcgaccgttaccatcaccaactactgtcagtgcggtaaagctgaaaatacggccaccttttacggttttagatacgcggtttaccgcgatcagcttttcctgcagttcgccagcttgtttttcgatgtgtgacatcttacacctctaccttagaactgaaggccagcttcacgggcagcatctgccagtgcctggactcgaccatgatattggaaaccggaacggtcaaaggatactttagtaatccctttttccaatgcgcgctcagcaatagatttgcctacagctgctgcggcatctttgttgccggagtacttcaattgctcattgatagctttttctaaagtagaagctgctaccaaaatttcagaaccgtttggtgcaataacctgcgcgtaaatatggcgtggggtacgatgtaccaccaggcgagtcgcacccagttctttgagcttgcggcgtgcgcgggtcgcacgacggatacgagctgctttcttatccatagtgttaccttacttcttcttagcctctttggtacgcacgacttcgtcggcgtaacggacacccttgcctttataaggctcaggacgacggtaggcacgcaaatctgccgcaacctgaccaatcacctgcttatctgcgcctttcagcacgatttcagtttgggtcgggcactctgcagtgatgccagccggcaattcatggtcaactggatgagagaagcctaaggccaaattcaccacattgcctttaactgcggcacggtaacctacgcctaccagttgaagctttttagtgaagccgtcggtaacaccaataaccattgagttcagcagtgcacgagtggtacccgcttgggcccaaccgtctacagcgccttcgcgtggagcgaaagtcagtgtattttcttcttgcttaacaacaacggagctatggatggtacgagtcagctcgccgtttttaccctttatcgaaataacctgaccgttgagttttacctctacgccggcaggaatgacgacgggtgcttttgcaacacgagacattctttcctcccgaattaagctacgtagcagataatctcgccaccaagaccagcctggcgagctgcacgatcggtcataacacctttagaggtagaaataacagcgatacccaaaccggccataacttttggcagctcatcttttttcttatagatgcgcagacctggacggctgatacgttgaatgctttctaccactgccttgccctggaagtacttaagtactaagaccagttcaggcttggtgtcgccttcgattttaaaatcttcaataaaaccttcttctttcagaaccttggcaattgccagtttcagtttggaagaaggcatggtgaccgctactttgttcgcggcttgaccgttacggatacgggtcagcatatccgcgatcggatcttgcatgctcatctgtatttactcccgtgattcaattggtgaaattaccagctagcctttttaaggcccgggatttcaccgcgcattgcggtttcacggactttaatacggctcaacccgaacttccgcaggaaaccatgcggacgaccagtttggttgcagcggttacgctgacgggacgggctggaatcacgcggcagagactgcagcttcagaacagcatcccaacgttcttcatcggatgagttcacaccagagataatagcttttaattcctcgcgtttagcgcggtatttgttagctagtttcacgcgaacgacttcgcgtgctttcattgattgcttagccatcagtaaccctaccttacttgcggaatgggaagttaaaagcagccaacaatgcacggccttcatcatcggatttcgcagtagtggtaatggtaatatccaaaccacgcacgcgatcgactttatcgtagtcgacttccgggaagatgatctgctcgcgcacgcccatgctgtagttaccacggccatcgaatgacttagcggacaagccacggaagtcacggatacgtggaacagcaatggagatcagtcgctctaagaattcccacatgcgttcgccacgcagggttactttacagccgatcggatagccctgacggattttgaagcctgcaacagatttgcgggctttggtgatcaacggtttttgaccggagattgctgtcaagtcagctgctgcgttatccagcagtttcttgtcagcgatcgcttcaccaacacccatgttcagggtgatcttctcgacccgagggacttgcatgacagagttgtagccaaactgagacatcagttgtttgaccacctcgtctttgtagtaatcatgcagtttcgccatcgtattactccaaattacttgatagtttcgctattagacttgaagaagcgtacttttttgccgtcttcgaatctaaagcctacacggtcagccttaccggttgtcgcgttgaacagcgcaatgttagaaacctgaatagcagcttctttttcaacaatgccgcctggttggttcagggccggaaccggcttctgatgttttttaaccaggttgataccttcaacaatgaccttaccagcagacaggacattctttactttaccgcgcttacctttgtctttcccggttagcacgataacttcgtcatcacgacggattttcgctgccatggttcgctccttagagtacttctggtgccagagagataattttcatgaacttctcattacgcagttcacgagttaccggcccaaaaatacgcgtgccgattggctgctcgctgttattatttaaaataacgcaagaattgccatcgaagcgaatgacagaaccgtccgggcgacgtacacccttcttggtgcgcaccactaccgccttcagcacatcgcctttcttcaccttgccacgaggaattgcttccttaatggtgatcttgatgatgtcgccgatgcctgcgtagcgacggtgcgagccacctagaaccttgatacacattacgcgacgtgcaccggagttgtcggccacgttcagcatagtctgttcttggatcatgttagtgctccgctaatgtcaactactactttaggacccagaataggtcgtttaaaagccccactaatgagggcgcggcattataacaccggttccaaattatgggtagaaaaaataaacggctcactttctgagccgtttattctatgcgagttggctactctattacagaatcgctttctctacaacgcgaacaagggtccaagacttagtctttgacaatggacggcattcgcggatttctaccacgtcaccgattccacattcattgttctcgtcatgtacatgcaatttcgtcgtacgacggatgaatttcccataaatagggtgtttcaccacacgttcgatagcaacaaccatggatttctccattttgtcactaactacgcgaccttgcagagtacgagtttggtcagtcattacgcacccgccttttcagtcagtaaagtcttaacacgtgcgatattacgacgcacttgtttcgacaggtgagtttgttgcagctggccactagccgcctgcatgcgcaaattaaattgctcacgcagcaggttgagcagctcagtgttcagctcttcaacgcttttttcacgcagctcttgtgctttcattacatcaccgtcttagttacaaaggtggttccgacaggcagttttgctgccgcgagcttgaatgcttcgcgagcagtttcttccggcacaccagccatttcaaacaacatttttcctggctggatcagggcaacccaatactctacgttacccttacctttacccatacgcacttcgagcggcttctcagtgatcggtttgtccgggaatacacggatccagaccttaccttgacgcttaattgcacgtgtcatcgcacgacgggctgcttcgatttgacgagccgtcaggcggcaacggccacaagctttcaggccgaactcaccgaagctaacatccgtaccctgcgccaggccacggttacggcctttgtgcatcttacggaattttgtacgctttggttgtaacatcagcgattctccttacttgcggcctttacgctgctgctttttaggttgagcagccggttccggttgttcaacagcagccataccacccaagatctcacctttgaagatccataccttaacgccgattacaccataagtggtgtgcgcttcagatgtgttgtaatcgatatccgcacgcagagtatgcaacggaacacgaccttcacggtaccattcggtacgcgcgatttcagcaccgccaaggcggccgcttacttcaactttgatacctttagcgccaagacgcattgcgttctgtacagcacgcttcatagcacgacggaacataacgcgacgttccagctgtgaagtgatgctgtcagcaaccaattttgcgtccagttccggtttacggacttcggcgatgttaatctgcgcaggaacgccagcgatatccgctacgaccttacgcagtttttcgacatcttcacctttcttgccgataacgatgccagggcgagcagtgtgaatagtcacacggatactcttcgctggacgttcgataacgatgcgagaaacggaagctttcaccagttccttagtcaggaattggcgaactttaaagtcgctgtccaggttgtcagcgaattctttggtattcgcataccaagtagagttccaaggtttgacaatacccaggcgaataccgttaggatgtactttctgacccattgctagtctccagagtctcagcgatcggacacaaccacagtaatgtggctggtgcgcttcaggatgcgatctgcacgaccttttgcacgaggcataatgcgcttcatgcttgggccttcgtctacgaagatcttcgtgactttcagatcatcgatgtcagcgccatcgttgtgttctgcgttagcaatggcagactccagtaccttcttaaccaaaccagcagctttcttgttggtataggccagagtttccagagcttgcgacactttcttaccgcgaatcaggtccgctaccaagcgaaccttctgagcagaagaacgagcgtggcgatgtttagcgatagtttccatctcttcctcctaccttagcgctttttagcctttttatcggccgcatggccgcgataagtacgggtcggcgcgaattcacccaatttgtgaccgaccatttcatcggaaacaaagacaggaacgtgctgacgaccattatggacagcgatggtcaaaccgatcatatttggaaagaccgttgaacgacgggaccaagtccgaataggcttcttgtctccgctttccaccgctttctctaccttcttcagcaagtgcaggtcaatgaagggacctttcttgagagaacgtggcatggcttatcctctaattattttttactacggcgacgtacgatgaacttatcagtacgcttgttgctacgggtcttcttacctttggtttgaacgccccacggggttaccgggtgcttaccaaagttacgaccttcaccaccaccgtgtgggtgatctaccgggttcatcgcagtaccgcgaacggtagggcgaataccacgccaacgacttgcacctgctttacccagcacacgcagcatgtgttcagcgttaccgacttcacctaaggtggcgcggcaatcagcttgaaccttgcgcatttcgccggagcgcagacgcagagtaacgtaggaaccgtcacgagcaacgatctgaacgtatgcaccagcagaacgagccatctggccgcctttacctggtttcatctctacgttatgaaccgttgaaccaactgggatgttgcgcataggcagggtgttacctgtcttgattgcagcatcaacgccagattggatctggtcaccagctttcaggccttttggcgccaggatgtaacggcgttcgccgtctttgtacagaaccagcgcgatgttcgcggaacggttcggatcgtattccagacgctcaaccactgcagggataccatctttgttgcgtttgaagtcaaccagacgataatgctgcttgtggccaccaccgatatgacgggtggtgatacggccattgttgttacgaccaccgcttttgcttaatttctcaagcagcggggcataaggtttacccttgtgcagctcagggttaaccactttaacaacgtggcgacgacccggagatgtaggtttacatttaacaattgccattgtttactcctccgacttactctgcgccgccgatgaagtccagattctggccttctttcagggtgacgtaagcttttttccagtcgctacgacgaccaacacgctgaccgtgacgcttactcttgcctttaaccagcaaggtgttaacgtcttcaacttcgacttcaaacagtttctgcactgcagctttaatttctgctttggtcgcgtcgatggcaactttgagaacgatggtgttacttttttccatcgcagcggacgctttttcagatacatgcggcgcgcgcagtactttcagcagacgttcttcacgaatcatgccagcatctcctcaacttgcttcacagcatcagcagtcataaccactttgtcgaaggcgatcaggctaactggatcgatacctgctacatcgcgaacatcaaccttgtacaggttgcgagctgccaagaacaagttctcgtcaacttcaccagttacgatcagcacatcttccagagccatatctttcagtttctgtgccagcagcttagttttaggcgcttctacagagaacttctcgacaatgatcagacgatcttgacgtaccaattcggacaggatgcttttcagcgcgccgcggtacatctttttgtttactttctgactgtggtcctgaggcttcgcagcaaaggtcacaccacctgaacgccagatcgggctctttacagaacctgcgcgtgcacggccggtacctttctggcgccacggttttttaccggaaccagtcacttcagcgcgggtcttctgagcgcgagtaccttgacgggcacctgctgcataagcaacaacaacctgatgtaccagcgcttcgttgaaatcacgaccgaaggtagtttcggaaacagtcagcgcgccttgcgcgtctttcaatactaattccattgctatccccttacgccttcacagctggtttaacgatcaggttgccaccggttgcgcccggtacagcacccttaaccagcagcaggttgcgctcagcgtcaacacgtactacgtccaggctttgaacggttacacgctcgtcacccaggtggccagccattttcttgcctttgaacactttgcccggagtctggttctgaccgatagaacccggaacgcggtgagacaaggagttaccatgggtagcatcttgggtacggaagttccagcgcttaacagtaccggcaaaacctttacctttagatgtacctgtaacatcgactttcttaacgtctgcgaaaatttcaacgctaatttcttgaccagcagtgaattcttgaccttctgcaaggcggaattcccacaggccacggccagcttctacgccagctttagcgaagtgacccgcttccggtttggtaacgcggttagcttttttagcaccggtagttacttgaacggcacggtaaccgtcgttctccaggtctttgacctgagttacgcggtttgcttcaatttcgataacggttactgggattgaaacgccatcttcagtgaagatacgagtcatgcccacttttttaccgactaaaccaatcattgtttcaacctctcaatcgctcaatgacctgattaacccaggctgatctgcacgtctacaccggcagccagatccagacgcatcagagcatcaacggttttctcggttggctcaacgatgtcaaccagacgcttgtgagtgcggatttcgtactgatcgcgcgcatctttattgacgtgcggagaaaccagaacggtaaagcgctctttgcgggtcggcagcgggatcggaccggtgacctgcgcaccagtgcgcttggcagtctcgacgatttccgcagttgattgatcgatcaaacgatgatcaaacgctttcaggcggatacggattctttggttctgcatgagaccagagctccaattatttataaacataaatgattactactcagacccatttcgattgatgggagagtgtaatcgttcaacatataacccccaaatcgggagtattgttcggaagtatcatttagctactcccgacagatcaaattcaatctgaccaaccaagattaggtaggcacgcgcattatacgtaaattcgggcagtaagcaagtcactgttgaaaatctatgcgagaacttacgtatttagccattcatctcaagttttagtgaatttacttattatcacactacgttactataggtgagtaacaaatattgaccaatacagggagagggagagttggtcatccatatattcgcaaaagggactatgccatggctcataattgccggagtattctactacttgttatcgtatgtttcatgactcaagcaatagcgagtacgcgctcgatttttcccctgcaggcctacaaccaaagccctacctattggtttccacccaacgcccccgattatactaaacccttagtttccgccaaacttcagcagcaagctcatcaaaacctactcaaacactatttcggcggcagccctacctcttcttcgccttgggatgagcactatgttcagcaaaagctatcggataaaggaacggatagtatcgcttcttctataaagaaagtattagagcgctttgacaatgtagatgccaagggagatagcattaattacggcagtaattatcgtccctatacacaaacatggattgatagcattcgtaccaatgtgccgctaactcagttcaagaagctacattttcacgctgcacagagaggaataaccgtaagtcaaacgatggttagagtgctccctaccaatgatcctagcttttatagcgatgctatcgcgggtgaaggttaccctttcgataacctgcaagaatcgcggctacacattggaacgcccatttatgtcattgggcatagtgccgatactctgtggagtttcattatgagcccagacttacagggatgggtgctgtctaattctattgcctatgccgatgaggcttttatccaactatggcgaagtgcggcaaaaaaaaagatggcggtaataaccgacttcaacgtagcgttgactgagccacatcaatctcgtatttatgccagtgatgacatggggagcattctcccacagcttgacgcccaacacctgatgattccggtggttaacaatcggcaacaagctgttatacatatcgccagagtagcgcccgacaaaataagtaccctaccgctcgctgcaagccgtaagaattttgcgttactgattcagcgttcactaggtcgcccttacggatggggaggcttgtacggctacaacgattgttcgagcgaattaaaaaatctgatgaccgcattcgggttttggctccccactcactcttcaaaacaaatcactcagggaaaaaccgttgatttaagccaatatccgccaaacgagcgcctagactttctggctaagcatggtcggccttttatgaccctcattcatattcggggacatattatgctgtacgtaggaaacactgatgaagaacggccgatgacctttcaaaacatatggggcttagggccgaaagatcgtagcaggagatctattattgggcaggcagttctgttccctctattgctttcttatccagaagatcgctctctggcatctttggcggcaggccctatatttcagatcagttatctcgaccagcctagctatatcgataaatcttagtgcacagtgtatatagtgctggtaagtaagtactgcgccaccctcaattgaatagacaaaaagtgagcaccgttgagatactcacttttttgttatcccagcattgtggcacaacagcttagttaagcttccctagctgcgcctgagagtagttctgtatacctaaacgttctatcaggctcagttcagtttccagccaatcaatatgttcttcttcatcggtcagaatttctttaagcagatcgcgagtaacataatcatgtatcgaatcagcataagcgatgccttcacgtaaatctttggcgccgcttaattcaagagccagatccgacctgagcatctcctcgacgtcttcgccaatattgattttgcctaaatcctgtagattaggaataccctcgagaaacagaatccgctcaatgtaacgatctgcatgtttcatttcatcgatggattcgtggtattccttatcattcagacggataagtccccagtttttaaacattcgcgcatgcaggaagtattgattgatagcaaccagctcgtttccgagtagtttattgagatgagaaattatttttttatcgcctttcatagataagccctccgcttccagtactaaaagtgtagtaccagatggcaaagagtggggaatcttatcccacctatgttttaagcaacgtcattcatttctggaatattcgcacactcctcgatcaaaatttctctcgcctgccggatacattttccgcaatcagttccgattggaaccagttggcgtagttgcttcaaagtatggggatgatgctggcgaacagcattgcggatgactttatcagacactccattacacaaacatacgtacatataaggctcacttcttaaccaatgccgtaagtgtaaatgggaatgctttttatttcaattaagattattttcttttgatataaaaaagggcgccggagcgcccttctaacttaatcagtaaagaaattaagagattactttagcaacaacaccagcgcctacagtacggccgccttcacggattgcgaaacgcagaccgtcatccatcgcgattgggtggatcaaggtaactttcatgttgatgttgtcacctggcattaccatctcaacgccttctggcagttcgatagtaccggtcacgtcagttgtacggaagtagaactgtggacggtagcctttgaagaacggagtatgacggccgccttcgtctttgctcagaatataaacttctgaatcaaaggtagtgtgtggtttgatagaacctggtttagccagaacctgaccacgttcgatatcttcacgcttaataccacgcagcagaacaccaacgttctcaccagcacggccttcgtccagcaatttgcggaacatttcaacgccagtacaagtagatttaacagtatctttgataccaacgatctctacttcttcaccaactttaacgataccgcgctctacacgaccagttacaacagtaccacggccggagatggagaatacgtcttcgataggcagcaggaacggcttgtcgatagcacgttctggttctgggatgtaagaatccaggaagccagccagttcgatgattttagcttcccactcaggagcgccttccagtgctttcagcgctgaaccgcgaactactgggatatcgtcgcctgggaaatcgtaagtagacagaagttcacgaacttccatttctaccagttccagcagctcttcgtcgtcaaccatgtcgcatttgttcatgaatacgatcatgtaaggaacgccaacctggcgacccaacaggatgtgctcacgagtctgtggcatagggccatcagttgcagcaacaaccaggatagcgccatccatctgcgcagcaccggtgatcatgtttttaacgtagtcggcgtgacctgggcagtcaacgtgcgcgtagtggcgagtcggggtgtcatattcaacgtgagaagtgttgatggtgataccacgagctttttcttctggcgcgttatcgatctgatcgaatgcacgagcgttaccgccgtaggttttagccaatacggaagtgattgcagcagtcagggtagttttaccatggtcaacgtggccgatagtaccgacgtttacatggggtttggtacgttcaaatttttctttagacacgactatattccttactcttgtgctctcccacttatgagagagcactggatcattgttttaaacccgaaagcttatttgccacgggcttcgataacggctttagcgacgttgctaggtgcttcagcatactccaggaattccatggagtaagaagcacggccctgagtctgagaacgcaggtcagtagcataaccgaacatttcagacaacggaaccttgacgcgaacggttttaccggtagcagtatcttccataccttcgatgataccgcgacgacggttaaggtcgcccattacgtcacccatgtaatcttctggggtttcgacttcaaccttcatgattggctcaagcagaactggtttagctcgtttgaaaccttctttaaaggcgatagaaccggctaatttaaacgccaattctgaggagtcaacgtcatggtaagaaccgtaatgcagacgaatcttaacgtcaacaaccggataacctgccaatggaccagctttcagctgttcctggatacctttatcaacggctgggatgaactctttaggaatagaaccaccaacgatttcgttgacgaattcataacctacgccacccggtggcagcggagacatgtcgataacaacatgaccgtactgaccacgaccgcctgattgtttagcgtgcttaccttccacgtccttaacggtgtcgcggatggtttcacggtaagcaacctgaggtttaccgacgtttgcttccacgttaaactcgcggcgcatacggtcaaccaggatatccaagtgcagctcacccataccagcgatgatagtctgaccagattcttcgtcagtccaaacgcggaatgatggatcttcttttgccaagcgacccagagccatacccattttttcctggtcggctttggtttttggttcaacagcaacagagattactggctctgggaactccatacgttccaagatgataggattagctgggtcacacagggtgtcaccagtagtcacatctttcagaccgatcgctgctgcgatgtcgcctgcgcgaacttctttgatctcttcacgtttgttggcgtgcatctgtacgatacgacccagacgctcacgctgtgaacgcactgagttcaacacggtgtcgccggagtttacaacgccagagtacacgcggaagaaggtcaagttaccaacaaacgggtcggtagcaattttgaacgccagtgcagagaatggctcgttgtcagatgaatgacgaacagccggggtatctttaccatcgtccagaataccgttgatagcttcaacgtcagttggagccggcaggtattcgataaccgcatccagcatcgcctgtacgcctttgtttttaaacgcagaaccacaggttaccagaataatttcgttgttcagaacgcgttgacgcagagctttcttgacttcagcctcggtcagctcttcgccgcccaagtatttgtccatcagctcatctgaagcttcagctgcagattcaaccaggttctggtgccattctttagccagctcaaccatgtcagcagggatatcttcgtattcgaaggtaacgccctgatctgcatcgttccagttgatggctttcattttcaccagatcgataacgccggtgaatttctcttctgcgccgattgccagttgcaatggaactggattcgcgcccagacgagatttgatctgaccaacaactttcaggaagttagcacccatacggtccattttgttaacgaacgcgatgcgtggaactttatatttgttagcctgacgccatacggtttcagactgcggctgaacaccaccaacagcacagtaaaccattacagcaccatcaagaacacgcatggaacgttctacttcgatggtgaagtcaacgtgtcctggggtgtcaatgatgttgacgcggtgtggctcaaactgcttagccataccagaccagaaggccgtggttgcagcagaagtgatggtaataccacgttcctgctcctgttccatccagtccatggtggctgcgccgtcatgaacttcaccgattttatgatttacgccggtgtagaacagaatacgttcggtagtggtggttttaccggcgtcgatgtgagcactgataccgatattacgatagcgctcaatgggtgttgtacgagccatttgattcctctattcctagggcgttcaagttcagttaacccatgcgggttggctaattgaagcgcccgcatggttagcattactactgcgtggtaattaccagcggtagtgggcgaacgccttgttggcttctgccatgcggtgaacgtcttcacgtttcttaacagcagaacctttgttctctgctgcgtcagacagttcattcgccaagcgcagagccatggatttatcaccgcgtttacgagcagcatcaacgatccaacgcattgccagggcattacgacgaaccggacgaacttctactggtacctggtaggttgaaccaccaacgcggcgagacttaacttctacagtcgggcgcacgttatcaagagcagtttcaaacgcttccaggtagtctttaccagaacgctgagccagggtttccagcgcggtatagacgattgcttctgcagtagattttttaccatctaccatcaggatgtttacaaatttggccagtaactcagatccgaacttaggatctggcaagattttacgttgaccaataacacgacgacgtggcatggaaatactccgttgttaattcagggttgtccaaaactctaagagtttattttgacattaaagtgaaaatgtttggccttacttaacggagaaccattaagcctttggcttcttcacgccgtacttagaacgagcttgcttacggtctttaacacctgagcagtcaagcgcgccgcgaacggtgtggtaacgcacacctggcaagtctttaacacgaccgccacggatcaggatcacggagtgttcctgaaggttatgaccttcaccgccgatgtaggaggtgacttcaaaaccgttagtcaaacgcacacggcaaactttacgcagtgcggagtttggttttttcggggtggtggtatatacgcgggtacatacaccacgtttctgcgggcaggcttccagtgcaggaacgttgctcttagcaaccttcatgctacgtggcttgcgaaccagctggttaatcgttgccattattaaaaaagctcctgggtttttgcttcgtaaacacgtgataaatccccctcgtatgcactaagggcagagtacgaggacgcagaattttatggctgactacctaaggtgtcaagaaatatacagcattagtcgtattaccatgccaagtgttgacgatgtttagtggttaaatcgacgaagtgagtatagccgatcgctagtattttgtctgaattttgaccaaccaaaccacgcgcagccagatcattttccagaacatagagagaagctaagttatttaacaatatgttaagaacatcggcgtcttttaacgtcgctagcactccatcctgcaaaaacagaatggcatcttcgtcggtggtcagtctcagcagcgcggataaatcgcattgaaaaggtgaacggctgaaggtatacaacatatttagtatcctgatacggtcaaaatgtcagcacaacgtcgtaagcggctaactgttggcgtaacttttcaggcgctaacacttcaacatccaacacccaatctttggcctgagccagaccgcgttgccgtaatgcctctgcgcacatataacacttttctacgtcataaagtggtaagacaccgaaagtggcaatatagtttctggccagaattttttccggctgttgttgcggaagtaactggaatacgccatccgagacaaaaaacacgccgatatcttcgctgagagccgaagccgccaatagcgcgtctagtccttcccggccactcgcgtttccgtgtgggccttgagtgaaaacaaaagcgatagatttcatgcccatctctaaaattgcgcgatcaaaattgaacaacgcggtcacaggtcagcgccgcttcggccagcgaacccaatccgctcagagtaaaaccgggctgtagattggcggcggccagatcaagctgctccgcctcatgccgatcgcagattcctcgccgcaacgccgcggccacacacacattgagctcaatcccattctgctgcgccagttgttgccacgcgcgaaccagatcaaactcatcgctggcaggcgaagtcagttgattggcgttcagcaccccttcccgatagaaaaaaatgctgaccaattgatggcccgccgccagtaacgcctgagcaaactgataagcactgctggcctgctgagtaccataggcagggccggtaaccaataggcagtaacgcagcattagcgctcgtgcccgataagatcgccgcttttgaactggcgaatatacagataaaccgtatgcttcgagatattcaaccgctccgccacttggttaatggcatctttaatatcaaaaatacccttctcataaagattgagcaccacctggcgatttttcgcattgttagacacattgcgatccgcattcacctcttcaatggtgaattccagcgtttgcgccaccagatcatccaccgatgacgcaaagttgacggaagaaggaacttcctgcgtttccggtggcataaatgtctgaataatttgtgagaaaggcacatccagattcatgttgatacacagcaagccaatcactcgctgaacgcgattacgaatagcaatagtgacggatttcatcaatacgccgctttttgcgcgagtgaaataggcgcgagagacgctactgtccgcaccggccatatcgtgcagcatacgcagcgccagatcggttatcggcgaaccaatctgacggccagtatgttcaccgttggcaattctgacggctgaacacttaagatcttccagcgaatgcagaacaatttcacaatgtccgccaatcaacatggccaagccatcaacgacggcctcgtatgatttcagtatttcataatctgtttgactgaacggacgttcatccagtaaatccagttcactggtttcgccagttaaaagcgaattagacatcgaagacaccaccctctaggtagagcctgtctcaatagcaacgggcagactcataactcaatatcttggaatataagcttagcaaatatgccaaagctaaatccttgcgtttgtgcgtggtattgacgttaagcccacaacccataagcgtcaagttatccaagagcagaagcgcaaaatgaatcagcagaatacaaaaaaaaaccgccgcgaaagcaattcgcaacggtctgtgctgttcgccaaagcgatactaagctatttccgaattatttttgggcttttgcttcagcttctgcggcggttttttcagcagcgacgtcggctttaggagcagctttcacatccagcaattccacgtcgaataccagagtggagttagcggggatccccggaacgccggttttaccgtaagccagttctggtgggatgaccagagtgattttgccgcctttcttgatttgtttcagaccttcagtccagcctggaataacgccgtccagacggaaagacagtggctcgccgcgtttgtatgaatcatcaaagacggtgccgtcagtcaaagtacctttatagttaactactacggtatcactgtctttcagcgcgtcaccagcacctggtttttcaactttatacagcaggccgctcgcggttttcttcacgcctttttctttagcaaaagtatcgcggtacttggtgcctttatctgaattttctttcgcatcttgcgccatcttggcctgagccgaggatttcacacgagcttcaaaaccttgcagagttttttcaatttcttcgtcagtcagcttagatttattggcaaaagcgtcctgaacaccggcgatcaactggtctttatccagtttgattcccagtttttcttgttctttcagcgagttgtccatataacgacctaaggatgcacccagtgcatatgcagattgctggtcgtcatttttgaacttgctgttagtcgttgctgccgcgtcaggagtttttaccgcgtcagcagccatagcctgagttgcattcagggtcaatgccatggttgtagccagcaaggttactttaaacaatgatttcatccatttctccaatggctcagggcttcttaccccaagcaacgattgtgtatgtttcagtactataactgccggagcgaagacaaaacaatctccgaatctacagtatgcagtgatatttcgactttttttatcacaagaagtttcctttttattgttctcactctctgcgcaaggcattccgcggcgtttacaggtagaatctctgacatcgctgtcgctccggcatgcggccatcgcggcaggaatcgatgacagaatcgtcgttagcagttatgagaggaaatactatggaagcgtctttgttcgaacaacggcttgaaatgctggaaagtcgtctggcgtttcaggaagtgacaattgaagaattgaatttgattgtgactgaacaccagatggaaatgaccaaactgcgggaacacctgcgtttgctgacggataaattacgggcctcccagccttcaatgttggcatcacaggcagacgaaacgcccccacctcactattgaggtttatttgcggcacaaaaaagccagccttgcggctggctttttcattgacgatcgtgatgccttagtggcaaccacagccgcctttaccgcaaccgccgccctgttgagcgtggtcatggccgtggtcatggtcgtgatcgtggtcgtgaccgccgcagcagccgccgccgtgttcatggtgatgatcgtgctcaccgtgtacgtggccgtgttgcagttcttctgcagtcgcttcgcgaatggcaacaacttcaacgttgaagttcagatcctgaccagccagcatatggttaccatcaaccacaacgtgctcgtcttccactgcggtaatttctaccggtactggaccctgatcggtgtcagccaggaagcgcataccgacttccaactcgtcaacacccataaatacgtctttcggtacgcgctgaaccagattttcatcatagttgccgtaaccgtcatcagcacttacacgcacatcaaaacggtcgcccgcttcgtggccttccaacgctttttccaaaccggaaatcagggagccgtgtccgtgcaggtagtccaacggcgcactcaccggagactcatcaactaacacaccgtcttctgtacgtacctggtaagccaggctgaccactaggtcttttgctactttcatgacatctcctacccttggaacaaaaattggcacagattgtagcggaaatctgaacccctgtacccttcagcataaaaaatcgctgaggataacgctactttggatcaaaaataccgataacttgctctttcgggcggacatgctgattgacctgctcgtcagtttgacgctgatgatggccacacttcacacattccacgacttccacctgatcttcacgccataaagcgagagtatccatagccttacactgcgggcaggtagcgccggcaataaaacgtttacgggttacagacatgctgatttctccggtttactcgtgttcatcccagccatcaagctgcctgctttcatgcagcatttctcgttggaaaatatcttccagctcgcgacgggcctctttgactctggaaatctgcgccacatcgccatggtgcggcggcatcagctcacgcagcatacgcatatccaaacgacggaaatgctgctgcgcccgataagcctgatgcgggtgcatacccagttgtcgtaatgttttacgccccagttccagcgcactggagaaagtttcgcgggtaaaatccttcacgccgctttgcaataattcatgtgcttccacgcggcctctggcgcgggccagaatatgtaaattggggaagtgttgctgacataaatgcaccaatgtcatggtgtcttccggctcattacaggtaatcactatggctttggctttctccgcgccggcggcacgcagcagttctagttcggttgcatcgccataataaaccttataaccgtatttgcgcatcacgcctacggcgctaacgtcccgttccaatacggtaatacgcattttgtttgccatcagcagacggccaataacctgcccgaagcgcccaaaacctacaacgataacctgcggatcgttgtcttccacgaaaggtttttcgtcgctttcttccggagcgttataacggcgagacagaatacgatcgataccttgcatcaataacggtgtagtcatcattgataaagtcacgaccaccagcagcagcgcgagttgatcgacacttaatacatgctgactaaaagccgcagagaatagtacgaaggcaaactcaccgccctgactcagcacaccggcaaactgaagccgcactgaacgcctcaggccaaaggctctggccaacccataaagtaccgtggctttgatggaaaccagcgccaatacgccaagtaatacttccagcagatgggtaaagataacgccaatattcagcgccatccccactgagataaagaacaggccgagcaataagcctttaaaaggctcaatagcgatttccagttcatgctgaaattcactttccgccaacaggattccggcgataaatgtccctaacgccatcgacaggcccagcgcatccataaatattgccgaacctagcacgaccagaagcgcggcggcggtaaacacctcacgcacgccggaggcaacaatataacgaaataacgggcgtagcaggtatcgccctccgatgagcatgccagcaaaagcggccactttcagagcgattctcgcccaatcgttagcgcccccaccgccgcccgccaaaatgggaatcagcgccaatgcgggaataacagccatatcctgaaataacaatacggagaaaccaagttggccgccttcgttacggttcatccctttttcacgcataagctgaagtgccattgcggttgaggacatggctaaaccgatgccaccaatgaccgcggcctgccaggcaaactgagtgaaatagagcagcgcgcccaaaaccgtcgcggtgatgatcacctgccccgctccgacgccaaaaatagagcgcctcaattgccagagtttggctggattaagttccagaccaatgatgaacatcaggaaaacaacgcctagctcagaaaaatgcagaatctcatccacatcgcgaataaaacccagcccccacgggccaatggcgataccggcaatcaggtatcccaataccgctccaatacccaatcgttgtgcgataggtaccgcaacgacagctgcaaacaaaaacagtaaaattgcggttaatagcgccgagccttccataattatggcctcccttgtggcaacggagaagctaaccactcggcgtaggcctgcgcatggttggacaacacttccggcttttgccgacgcgcccagtaaacaatcatcggatttatccaatgcatatgacacatagacgcagtcaattcgaacgggcgcagaatgtcatccatcggatattggttatagccgccgactcgatatgtcccttccggttcgccggtggtaatcaccgaacgccagtattttccccgcagagcatggcctccgacgccattggcaaacccgcgcgccagtacgcgatccagccattcctttaataaggccgggcaactataggtataaagcggatgttggaagacaatgacctgatgctcacgcagtagctgttgctcgtgatgaacatcaataaagaaatccggataatgtgcgtaaagatcgtgcacagtgacatgcgctagctgctttaccggttgcagtaaaacccgattggcgaccgagtcctgtgattccggatgggcatacagcagcaaaaccttcggcggctgtgacatcattcccctccaaagcgtcgtcagggtgcgggttttccgttaccatgcgtcgcaagacttaaaatagggcgtttaacgccctgtttgtacccaaagtagaagtagtgggtattgcagattaggctagaaactaatgcctctgcgacctcaggtactaagggttaccttaatataatgacaatttaacatactctaaacatacggcactctatgattgttttctcttcgcttcaaattcgacgcgggactcgcgtcttgctggacaatgctacagcgaccgtcaatccgggccagaaggtcgggctggtaggtaaaaacggctgtggcaaatcgaccctgctggccttgctgaaaggcgaaatgagcgccgatgggggcaacgccactttccccaataactgggcgctggcctgggttaatcaggaaaccccggcgctagatatgccagcgatagagtatgttatcgacggcgaccgtgaatttcgtcagttggaatccgaattacaggccgccaacgaaaaaaacgacggtcatgctattgctacggtacatgggaaactcgatgccattcaggcctggaccattcagtctcgcgcagccagtctgctaaatggcttaggcttttcgcaggatcagttgcagcagcccgttcattctttctctggcggctggcgaatgcgccttaatctggcacaggctctggtatgtcgttctgatttgctgctgctggatgaaccgaccaaccatttggatttggacgccgtaatctggctggaaaaatggctgaaaagctattcaggtacgctaatcctgatttcccacgatcgggatttcctcgatcctattatcgataagattctgcatattgaacagcagtcgctaaatgaatataccggcaactattcatctttcgaacgccagcgtgcgaccaagctcgctcagcagcaatcgatgtatcaacaccagcaggaaaaagtcgcgcatctgcaacactatattgaccgtttccgcgctcaggcgaccaaagccaagcaggcacaaagccgaattaaaatgctcgaacgcatggaaatgattgcgccagcgcacgttgataacccgttccgctttagctttcgcacgccggaaagcctgcccgatccgctattgcgaatggagaaagtcagcgccggctacggcgataaaaccattctgcaatctattaagttaaatctggttcccggctcccgtatcggtctgctcggacgcaacggggcaggtaaatctacgctaatcaaattgctggctggcacgctggaaccacaaagcggtgagatcggtttgtcgaaaggcatcaaactaggttacttcgctcagcatcagttggaattcttacgtgcggatgaatccccgctccagcatatgagccgtttggcgccgaaagagccggaacagcaactgcgggattatctgggcggctacggtttccagggtgatcaagtcacagatccgaccgctcgattctccggtggagagaaagcgcgtctggtattggcgctgattatctggcagcgccctaacctattgctgctggatgaaccgaccaaccatctggatttagatatgcggcaggcactcaccgaggcgctaattgattttgaaggcgcattggtcgttgtttcccacgatcgtcacttattgcgttctacaactgacgatttgtatctggttcacgacggcaaagtcgagcaatttgacggcgatctggaggattatcagcagtggctggtcgatttacagcgtcagcagtcacagcaaggtagcccggaaaaagaagtctctggaaatagcgcccagcagcgtaaagaccaaaaacgccgcgacgctgagttccgcacgcaaacccagccactgcgtaagcaaatcatgacgctggaaaaacaaatggataagttgagcgccgaactagccgccgtggaagatgaattggcagattctgcgctgtacgatatctcccgcaagagcgagctaaccgaatgtttgcagcggcaaaatcaggtgaaatccaaactggaagaaaccgaaatgaattggctggatgcccaggagcaattagagcatctgactaaggaatttgaagaaaattaagcgtttccaagctgaaaactgccgctattcatggatgatcgcggcatggaaaaaattgatatcagcattattgtgccggtgttcaacggcgaagcctatcttgccacgctgcttgattcattgagcagtcagtcaggcgtatctttcgaaatcatcgctatcaatgatggctccagcgacggcagcgccgccatactcacggatcgcgcccgccgtcactcttttctgcgcgtcatacatcaacccaatcaaggtttatccattgcccgtaatcagggcattgctcaggcaaaagggcaatgggtcgcatttgccgattgcgatgactggctagcgccgaacgcactgcaaatctggctacaacaggccacagaacagcagttggatctactgattggcaacggctatcgtttctgcggcgaacccactcagcagagcgtcaaacctttattacccgaacaacgctggcaaaagacgctcaccggaaaacaatggattatccacagcgtcgcacaaaacaactggctgcatttttgctggctacaactgatccgtcgagagctaatccaggcgcatcaattaacttttacgcctcatcagctccatgaagatattttatggaccactcggctggcgttagccgcacagcgcgtaaattactgccctgaaccgctttatggctatcgcaccgcgccccactccatcaccagaaaacactgttttcatctaagaatgttacgagcagcgagttatctcgatattatcagcgaattagtccgtattgcggcgcaatcagagccagtgctgagcaaggcactgctacgccacgctaatcgagaaagcggccagctattaggcttaacccgttggcaaaccagaacctgcgcagagcgtagccagcttgccagacgtttcaaagaattaggattggaaatgcccttaatccggggagcgatcggcctgcgggatttctggcgggcgctacgttgcattatcattttccgccgctacgccagacaaaaaccttcacttaaggccgataaaagggtttgtcaccgaggatcgtggcccgatgcataatccgacgctccggcaaataatccgcattggcgtaatgctgggtaacccgattatcccaaatagccacgtcatcctgctgccaacgccagcgcacctgaaattcgggtttcgtcgcgtgagcaaacaggaatcccaacaaagcctcactttctttagcgcttaattcattgatttttgtcgtaaaaccttcattaacgaataacgcctgacggccactgaccggatgggtgcgtaccaccggatgcaaaagcggcggattcttctctttcgccagcagccagcgttggtgatcttccagcgtagcccgatgcttatgctcagggaatgatttagtaaaatcatgctcggcctgcaatcccgccagaagctgcttaaacggggcagatagcgcctcgtaggccgcgatgccgctggtccatagagtgtcaccgccggtagcaggtagatgcttcgccgccagaatggcacccaacggcggattggcgatgaaagtcacatccgtatgccagttatcattatccggcggattatcatcgtgagtatccagtacgataatttcctcacactctttgacgtgcggataaactggatgaatatgcaggtcgccaaaacgccccgccaaatctcgctgctgcaacggcgttatcggctgattacgcagaaagagcacctgatgtttgagcaacgcatgataaagctgctcaaattgactatcgcccaatgggcgggaaatatcgatattttcgatttgtgcgccgatataaggcccaaggggattaaccactaaacgttcgttcattgttgcactccgtaccaaggggttaagcggcgctgaatggcccgaagccctaattccatgctgaaagcgattattgcgattacgccgataccggcgataaccacatccgttgctaaaaattcaccggcagactgcaccataaatcccagacctcgcgtggctgcaatcagctcggcggcgactaaagtagaccaacccacgcccagaccaatgcggatgccggtcagaatctcgggtaaggcactcggcaataccacatgtcgtaatacctgccaacggttggcacccaatgcttgcgcggctctgactcgcacctgcgctacgctgcgcacaccggctaccgcagccagagtaataggcgcgaaaatggctaaataaatcagcaaaatcttggatgtctcaccgatgccaaaccaaatcaccatcagcggtaaataagccaaaggaggtacgggccgataaatttcaatcagcggatccaatatgccgcgtaccgtcggacttaatcccatagcaatgccggttgggattcccagcgcgattgccgctaataaagccagcataatccgcccaaggctggcggctaaatgctgccacagcgtagcgtccataaagccttgtgggctggcaatggtcatgagctgatgcagcacttgctgcggcgcaggaagaaagagcgggctaatcagttgcagcgccgtaacgctccaccaaatcactaatatcagcgctaacgtcagcaaacttaaccctaaactgcggggcaataactgcccgatagagcgaacgaatcggcggctaattcgccctgaagatgccgtattcggtgccgaagaacgcaatgtgctgtgcaggctcatatcaaagcctctcgctgctggaatactttactcagcacatattcacgctgagcaatgaattctggatctgacttaattgagcggcaggcttcgccattggcatatcgctgaccaaaattgagcgtcaaccgttccaccacctgccccggccctgacgataacaacagtagctcgctggctaaaaaaacagcttcttcaatatcatgggtaattaacagcacctgcttaccggtatcgcgccaaatattcagtaacagttcttgcatctgctcacgcgtgaatgcatctagcgcaccgaaaggttcatccaacagcagcaagcgcggatcaaccgccaatgcacgagctattccgacgcgctggcgcataccgccagagagctgccagataaagtgatgctcaaaaccgcttaatccgacctcgcccagcattttcaacgccgtttcacgtcgctgcgagggatccatgccagccagttgaagaccgaattccacgttgctaatcacatctcgccacggcagcaatccttcatgctgaaacaccacgccgcgatcggcacccggcccagtaatcggcacaccgtctaaagtgatacttcccgccgagggttgaataaagccggcaatcaggttcaataacgtggtttttccgcatcctgatggcccaagcaccaccaccagttcgccggaggctatatttaacgacacattttttaatgccgcttttccctgatattccgcactcaggccgctgacgtttagcatctggcctcctaagactgcggcgctgcttgtaccgctttaacaaagcggtcggtaacgtaatcgctgtaatcctcagcaacctgcggaattttcccctgcgctttcaggaaggcggcagtatcggcaatcgccttatccacgggtttgctcagttgggtaatttgctcggctaccggtaaataagtatttcccttcactaattcgggaatctgagcttccggcacgccgctcaaacgggaaagctgttgtagattttgcgcgtttatcagccattggttcggttgagacaaataagcctgctgcgcatccagcgcgctacgggcaaaggcggtcacaacttcaggatgcgccttggcgaaatcttttctcaccacccatacatccagcgttggtgccccccagcgcccgacttccgccgaatcggtcaacactttgcctgttttcgctaattcatttaccgcaggtgcccaaacataagcgccatcaatatctccgcgctgccacgccgccgcaatggccggcggttgtaaattcaggatagtgacctgatcgggctttatcccccaatgttttaacgccgccaacaggctgtaatgcgttgtagagataaagggaaccgcaatgcgtttgccgatcagttcctgcggcgttttgatgtcttttttcaccactaaagcttcggaactaccgagttgagaagccagcaaaaacacttcaatgggaacctgctgactggcagcaactgccaatgggctggaacccaaattgccaatttgtacatcgccagaggccagtgcgcgcaccacgctggagccactgtcaaatttgcgccaatcgaccttggctccggagagtttggcaaaactgttttctgcctgtgccactttcgccggttccgcagccgtctggtaggccacggtaacgtccaccgcgtgggcagcagtcgttgccagcgacaacaccaataaactcaaagagaaaggtttgaacgccatggtttgctccacttggataaagttgccattcagtgacatcactgcagcaggagcgcaaagacgctcggtatccacagttgtacccaagagagataacgacataaaagaataaaaaaatattttttattcttttgatgaataagagataaataaaacggcagagtgaagctcgagccaataagaggatctggggtgagtatcgctgtcacagacccggagggaaataacctatgagtctgattcagcgcataaaaatcgagatattaattacaacacaattgcgccttgcagaaatatcttggcataaccggcaatcaccgtgcgatcgcctttcaaggtacagaaaagctcgcctccccgatgcgatatttggcgggcatggagactatttttacctaaacgcgcggcccaatatggcatcaaagtacagtgcgccgagccggtcaccggatcttcatttccacccaacgtaaagaagcgcgaaacgaaatcgactttatcgccgggggcggtaacgatcacaccacgccccattttttcgatcagttcgccaatatcaggctgcaaatcatgtacctgctgttccgacgccaatactactaatagtgatttagcctgcaacaccagctgaatgtccacgtccagcagcttagttaaaatgtctggtgtagcaatagcttgcggcggtagagaagggaaattcaaggataacagttcaaaatcttcggcttcgcgcttcacataaagctcgccgctggcagaacgaaagacaatgtcactcaaggccggattgacatggctgaacatcacatgcgccgctgccagcgttccgtgtccgcacaaatccacttcccgcgttggcgtaaaccaacgaatcgcagtttgatccccatcatcccaaataaaactggtctcaggtaaatgcaattccgcagcaatggcttgcatgtgctctgtcgttaacggacgttttagcaggcagacgccagccggattacccagcagaccctcgccaacaaaggcatctacgtgaaaatagttaaaatcgctcaaatcgatatcctatagcagcaaagtattgatgtgattaatgccagatcagaagcacacaggccgccgtcaatatccccatcgagacattaaaggtaaaccaggcgcggcggctacgcagcatttggccgatcacactaccgaagcccaaccagacgataccgcacaccagattgaccaaaaacatacccaagctaatcatcacgatggaatgatcataggcggcaccggccagactgaaactagcaaccgagcctaatcccatcaaccaagcctttggattaagaaattgtagcagccagccttgatacagacgcatcggtttaggcggtgcaacgtcggtttcgagtttttgataggcagaagtggcaactttccatgccaaccacagtaaatagaggctacccagaactttcaatgccagatgcagcgaagggtaaatcaaaatcaggctgcccacgccgaatgccacgaacaacaacacactttgcattcccagcataatgcccaacatcagccaaatggagcgagtaaagccaaagttagcgccagaagcagtcaacaacatattatttggaccaggcgtgattgcggcaacccaaagaaaacctaacatcgaaagaaataaacttagctccatgaaacgggtgcctctcacccttgaaatagatgcgatatatcattgaagctaacagtgtgatattgatcatacaagagcaatagcatgatttaaattcatcttatgtatgagatctttcgcccgctagccggtgccagtaacccacatttacagactctgttaccccgcctgatccggcgtcgaatacgtctccagccgttttggcagcgcctaaacctgcccgatggagattttgtcgatctcgcctggagcgaagatccagacctcgccagagaaaaacccagagtcgtactgttccacggtctggaaggcagcttctacagcccttatgctcacggcctgctgcatgcctgtcgagaacagggctggctcagcgtagtcatgcattttcgcggctgtagtggagaacctaatcgtaaatcccgcatttatcattccggcgaaacggaagatgcccgttttttcctacagtggctgagggacagctatggtcaggtaccaaccgctgccgtcggcgtctctctaggcggcaatatgctagcctgctatttggcgcaacagggggaaaatagcctattggaagctgcggtcgtggtttccgctccactcatgctggaaccttgtgcctaccgtctggaacagggattctcacgggtctatcaacgttatttgctcgatcaactcaaacttaacgcgacacgtaaattattaagctatcccggcagcctaccgctggatttatcccagctaaaaaacttacgccggatacgcgattttgatgacgtcatcaccgcacgaatacacggttttaccgatgcgctggattattatcgccgctgtagcgccctacccctattaccgcagatccgtacaccgctgctgattattcacgctaaagacgatccttttatgacgccagacgttattcccgttcaaacggcattaccgtcgaatattgaatatcagttgacggaacacgggggtcacgttggttttgtcggcggctctataaaacaaccgaaaatgtggctggaacagcgtattccggcctggctatccccttatctggagcaaaaatgattattccatggcaacaaatagacagcgctacgctggaaaatttgatcgaagctttcgtgctacgcgaaggaaccgactatggcgaacaggaacgatcgttggaacaaaaagtggccgacgtacgccgccagttagtcagcggcgaagccgtattggtgtggtcggaactgcatgaaacaatcaatattatgcctaaagcgctatttcgtgccggctcagaagagcaagaataatccgtcactcactctgttatttcaccgtggtgtccaacgcgataccacagtgaaacaagatgacaaaaccgccgctttgccctaaaagtaactatcagctatttttcttcggccattatccccagctcattactggcagataaatcataataatcctttgaaaaatataacaataactcagtaccctacggagcagaacccctatgtcagccaaacatccggtgattgcagtaacaggctcaagcggtgcaggaaccacaacgaccagcctggcttttcgtaagatatttcaacaactaaacatacgagcagcccaaatcgaaggggacagtttccaccgctacacacgcccggaaatggatgcagcgatccgcaaagcgcgggatcttggccgccacattagctattttgggcctgaggcgaatgatttcggtttactggagcaaagcgtgtctgaatacggcgagcacggccgaggacgctcacgcaagtatctgcatacttacgacgaagccgttccctaccatcaggtgcctggaactttcactccttgggagccactgccagaacccaccgacgttttattctacgaaggtttacacggcggcgtagtgaccgaacaccatgatgtagctaaacatgtcgatctgttggttggcgttgtcccaatagtgaaccttgagtggatacagaaactggttcgggataccggtgagcgtggccattcacgagaagcagtgatggattccgtggtgcgttcgatggatgattatattaattacatcacacctcagttttcccgaactcatatcaacttccagcgggtgccaactgtagatacatccaatccttttgcagccaaagctattccgtctttggatgaaagttttgtggtgatccatttccgcgggctggatcaaattgatttcccttaccttttggcgatgctgcaaggttcattcatttcaaatatcaatacattggttgttcccggcggaaaaatggggctggcaatggaattaatcatggcgcctttggtacaacaattattagaaggaaagaaaatcggctgattccggcagagccaatcaatacgtaacctctaataaatgaagacggctatcatttgatagtcgactcttatcagtgaataatccatataaaaataataaacaaaatcataattaaatacatcaacaaattaatcacttttatttaaaataaaacagtgctagtttttattcgcccattactgtttcatacccaataagccatgctggaaaaacttaaggagtgtataaatggaaatagcggatattggccgtactgcacttatagagaccgatagattaagaagaaatggaagctgcgtattttccacatgtgaatatagcaacccgactggcagccatacagatagaatattcattcatgcaataaatgaattggaaaacaatattatcttctttcccacgggctaaaagataatggctcaattgcgaaaattgagtacgcaatcttgcccctagctctaattaccgttttattatgcttttcaatttagttatcggaagcagtgggttagcaaccccctctccggctcagcgttttatcggtattcccaacatgattctctgtgctattggtacagttctatacatcacagtatcaaagaaggtgtttctatatggctggcacacccatgagcgcctaacgctaaggaatatcattacatgactaatcgccgctatttatttaagcaacaatagaaatttattactgatagataaatatcacgcagcacctatttctaggcttattatcgtagaatatatttttgttttttatcttattcagataaccatgttctatttaacaggtattcaggtgtcgctaaatttattaacactacctattttcacattgttattgtcgtacctcgacgaacgtattctgatttcatcaaggagtattttttcattaaggttcatactggcaatgttgctgtttatgtccgtttataaattaaagaccattcgataacatggagttaaacatgattaaagtcgtcattgttgatggtttttcttccggaaaatttctggcgaaggaactatttgatgcgggttgcttgctattacacatttcgtctagcgctgatttacatgattactactattatgggtttgattattcgatctattcgtcgctactcacccatcaaaacttatccgataccaaccaggatgttgcgctattcgcccccgattacatcattgccggagctgaaagtggccttttgctctgcgacgaactcaatcatcgctttggtttgccttttgccaatgactataaccatagcgaagcccgcagaaacaaatatgccatgattgaaaccattacccatgccggtttagctgccgcacgacaaaccaccgccagcgaatggccagccgccgaacgttggattaaatctcatcacggctaccccgtcgtactaaagtcgttggccagcgcaggctctgaaggcgtattcatttgccattctcaggcagaggctgaagacgcatttgttcaaataatgggtagctacagcaaattaaatgcggttaatcagcaggtgttaattcaggaatatctcgaaggcgcggaatacgtggtgaatatggtttcactgatgggcagaccgctggtaactgaagttgtccgttacaccaaacttcgtcttgcttcagggcggattctttatgatatcgatgaaattctggatgcatccttcgagcattatcaggcgctggttagttacactcgccaggtaattgagtcattaggaattcgcaatggccctagccatgcagaagtgatgttaacaacgtcggggcctaaattagtcgaggtggccgccagaacggacggaattctgcgtcctaccatatcggcgcgtaccaccggattggggcaaatttgtgccacggttatggcaatcaccgcaccgacgcagtttctgtcatttaccgaatgccatccgtcataccagctacaaaattactcttacaatatcggcctgattaatagacataaaggtatcttccatcagcaggattttttatccgaacttcttactttaccgtctttttcactggctgatttttatgtagaagaaggtgatgctattggggtcactcaggatgttttcagccagccaggtgctatttatctggttcattctgacgcagaaaccattcgcaatgactatctaacgatcaggcgcctggaaaacgacggcgtttatcttaaaaatgtataggaataaatacgataacagcctgatagaaaatcaaaaaattgaaccgcggcgattgactgcgaaatatgaatcgcggtgagtaagggaacagcgggggatttaacgatttaagatgtttgagtctttgagtctttgagtctttgagtctttgagtctttgagtctttgagtctttgagtctttgagtctttgagtctttgagtctttgagtctttgagtctttgagtctttgagtctttgagtctttgagtctttgagtctttgagtctttgagtctttgagtctttgagtagcagtttccggataaacaggcagtgatacaagcaattctgtacgtatatgaatcctataaatacaacgcccggagcgaataaaccgggcgttgataaatatggtcaggttagagagcgaatttcaaaactgtgggtgattttggcagccttacccaacatcagggctaccgagcagtatttctccgcggaaagctcaacggctcgctcgacggctttttcggtcaaatctttaccactgacgacaaaatgcaggttaatcaaggtaaacaggcgaggggcttcctcccgacgctcggaggtcaattttacttcgcagtcgtgcacatcgttgcgccctttttgcaaaatggacaccacatcgatagcgctacagccaccggccgccatcagcaacatttccatcgggcttggggctttatctccggcgttaccatccattaaaacctgatgaccagaggcggattcacccaaaaaagtcagaccttcaacccattttactcgtgcctgcatacccgtcactccctattagcttttccgaatcagactactctttcattcataaagtggcaatgtaaccagaccctcatcatgctgaagcgatacaacacaagacactggcctcatcctgtgctacaaacagagccgaagagatgtttcttagaataaaaagggtagagatcaagactcagtgaagggtctctatctgagatgtatattggctatacctttcggtagttgagcaaattaatatgctaatagaaagtgtattttataaacacgccgtacagggaactctgagccctgttaagttaggcagcgataacaacagaggataacagcgaatggttctcggcaagccacaaacagacccaactctcgaatggttcctgtctcattgccatattcacaagtatccatcgaagagtacgctgattcaccagggtgaaaaagccgaaacgctttactacatcgtgaaaggttccgttgcggttctgatcaaagatgaagaaggtaaagaaatgattctctcctatttaaaccagggggatttcatcggtgagcttggattatttgaagaaggccaagaacgtagtgcttgggttcgtgcaaaaaccgcctgtgaagtggctgaaatttcttacaaaaaattccgtcagctgattcaggttaatccagatatcttgatgcgtctgtcttcgcagatggcgaatcgcctgcaaattacatccgagaaagtgggcaaccttgctttccttgatgtgaccgggcgtatcgcgcaaacgctgcttaatctggcaaaacagcctgatgcaatgacacacccagatgggatgcagattaagattactcgccaggaaattggccagattgttggctgctcccgcgaaaccgtcggtcgaatcctgaaaatgctcgaagatcaaaacctgatctctgcgcatggtaaaacgattgtcgtttacggcacccgttaattacctaaaaaaaccggttccctgtgcttaacatggcaccggttttttctttgtctgcatatggacgacggatattgacctgatgtggcgtcggctgatttaccaccctgaagtaaactatgcattacggcaaacgctggtgctgtgtttgcctgtggctatcggtttgttgctcggtaatttgcagcttggcctgttattttccttagtccctgcctgctgcaatatcgctggcctagataccccccataagcacttcaccaaacgcttagtcgttggcggaactttattcgccctcagcagttttctgattcaacaattcctgctgtggcatattcccctccccctgattatgtttggcctgactctcattttaggcgttaacggagccatcagccccctgcacgcccgtttattgcccgctgcgctagtcgctgcgatattcacactaagcatgattggccgcttcccaatttggcacactccgctacttttcatcgttggcaccgcctggtacgggctatttaccggcctgtggttccgcctgtggaaagaacagccgatgcgagaaaccctgagccagctatatcgccagttagccgattatttagaagccaaatacagtttgctgactcaacatatcgatccggaaaccgcattgccgccgttgctacaacgccagcagggcgtaatggatttaataacccagctttatcagcaacttaatatgcttcctcatactcataaaagggagcaaaagcggctacgattaatgtttcaggtggcgctggatttgcaggagcacattactgtcagtctgcaccaaccggaagaagtgcaaaaactggtggaacaaagccatgcagaagcggtcatccggcggaatgcgcaggtcattgctcatcgtttgcgggtcgtcgctgataatcttctgtatcaccgccatgaattacagcgttttaccatgaccaacgagctggcagcgctggaaaaaatcgccggacagcacccggataatccggttggccagttttgttattatcatttccgtcgcatcgcgcgcttgctgcgtaaccaacggccgctctatcggcgagatttaatgtcggaccaacaccggttgccgttctggccagcgctcgccagttatctttcgtttaaatccgtcgcgctgcgtaatgccggccgtctggccgttacgctagccgtcggcagcagtttgggaatggcatttaatctgcctaaaccctactggattttattgaccgtgatgttggtcacccaaaacggttataacgcgacgcgggtaagaattcagcacagagccttgggaacgttggtcgggctggttattgcagccggtctgctgcaacttcagcttccacaaggtaccacgctgaccattatgctgtttatcacgctagccgcgtatttggttctgcggaaaaactacggcctggcggtcattgggctgactattaccgccgtgtatacgttgcaactgctggcactcaatggcctgcattttctggttccgcgcctgattgatactctgattggctgtgcgctggcctttgggagcaccatctggctgtggccgcaatggcaaagcggtctgctgcgtaaaaacgctcatcaggcactggaaagcgatcaaaatatcctgcagttattactcaaaaagacgcctaaccttggcgagctggcaaatgaacgaatgcaggttaatcaggcacataacgcggtgtttacttcccttaatcaggcaatgcaggaaccgggctttaactcccgttatctggccgatatgcgtctgtgggtgactcacagccagtttatcgtcgagcatatcaacgcgatgacaattctggcgcgggatcattacatgctgacagagaaactggcggaagagtatttacagcgctgtgaaattgcgttgcaaagctgtcagcagcggttggaatacgacgggccgagcagcgaaaatagctttatgcgtccaccagagctacatccggatatgccaatcaccgaaatggaacgccatctcaggcgcattttgtcccatctaagcgtgatgcacaccatctcgtctttagcctggcgacaacgaccacatcatggcatttggctgagcagaaagcttcgggatagctgagtgtttaaaaaaacactagcggaacataattgaggaataaattaccgggctgatgaggcgtcctaattacaggacgccactgactaacttttggagatgcacatcttgcagttgcccaacgccaagccgattcatactgtctctgtgatgaccacgcaacaaagcggcgacttgccgttattcagcgtctagaactgcggcaacagcctgcgcaaatcgcgccataccctgctcgatgtcttctaattcaatcactaacgatggtgcaaaacgcagcacattcggcccggcgtttaaaatcatcaatccgttggccgctgctgcggtcaggaaatcacgcgccctcccatgatactgtggcttcagctcagcgccgataagcaatcccatcccgcgaatatcggtgaacagatcgtattgcttcccgatagccgttaatgcctccgcaaacaggtcgtgacgctgcgctatgccatctaacacctgtggggtattaatcacatccagcgccgcttctgccactgcacaggccaaaggattacccccgtaagtcgtaccgtgggtgccaacggtcatcaccgaggcaatttcctccgttgtcagcattgcgctgattgggaaaccaccacccagcgccttcgccgtggtcaggatatccggcgtaatgccgtagtgcatataggtgaacagcttgccgctgcgtcccatgccactttgaacctcatcgaataccaacaatgcctgatgacgatcgcacagttcacgcagcccctgcatgaataccggatccgctgcggtgatgccgccttctccctgaatcggctccaatacgacggcgcaggtatggtcgtccatcaccgcttttactgcggctaaatcgttgaaaggcacgtggataatatcagcgggttttgggccaaaaccgtcggaatatttaggttgcccaccgacggatacggtgaacaacgtgcgtccgtgaaaagcattatggaaagcgataatcttggttttatacggactatggcgctcaatggcgtagtggcgcgccagtttgaaagcggcttcattggcctcgccaccggagttggcgaagaacacccgatcggcaaaggtagcgtcaatcagcttctcagctaggcgtaatgcgggttcattggtgaaaacgttgctggtatgccacaaggcttccccttgctgatgcagcgcagcaaccaacgctggatggcaatggcctagagccgtgaccgcaattccgccagcaaaatcgatatattcattgccttgctgatcccagacccgactgccttttcctttaacgggaataaactgagctggtgcataaaccggtagaatcactcgatcaaacgtgctccgatttaccgctgatttttctgtcattccgctgtccgccttgatgatacgcgctgataccgctcgccattagtgaaaatataatcacaaaatatgcataaaaaatcacaaacaggcaaacaaaaaacgctacgaacacgaaaacaatcgtaatgcattaatttttaaggaaattatccagcagctgatgaccttgctcgctgaggatgctttccggatgaaattgcacgccttccagcggaagcgtgcggtggcgtatccccataatttcatcgaacgcaccgtttcgctcggtccacgccgtcacttcaaagcaatctggcagcgtttctggcgcgataaccagagaatggtagcgagtcacagtaagtggctgatttaatccacggaagacaccctggttattatggttaatagccgtggttttcccgtgcataacctgacgcgctctcacgatgctggcacccaaagcttgccccagcgcctgatgccccaaacacacgcctagaatcggcattttgccggcaaaatgaccgatcgccgccagcgagataccggcttcgttcggcgtacaggggccgggcgaaatcaccagatgggaaggagcgagttcttctatatcagagagttgcagttcatcattacgctttaccagcacctctgtacccaattcgcaaaagtactggtaaaggttgtaagtaaacgaatcgtagttatcaatcagtaatagcattttcaatccaacctaaatcatgaccctgccatcttactgattttcacgtcattcgttgatgagtttgtcgcaaaacctagcgtttacggccaccggtaatcgaacccaatacaccgcgcaaaatttgccgccccaaatctcgcgccatgcttttagccgcagtttggacaataccatcacgcttgccgccgcgcgggccggtagaaccaaacagcaaatcgttcaatccagccatcagcccaccgccagctgccggttcattaggcgatgacggcacagttttgcccgcttcggcagcctgtccaaccgtagaaaaaccgtctgcggccagtttttcataggcggattcacgatccaccatttcctcataacgaccgtacaatggcgaatgattcagcgcatgatttcgagcggcatcatctaaagcacccattttcgattgcggcgctatcaccatcgcccgctccacgacgtttggccgtcccttttcatcgagaaaagagactaaagcatcacccacgcccaattcggttatggcttgttccgcgctaaaagccggattggctcgcatcgtttgcgctgccgattttaccgttttctgatcgcgaggagtgaacgcgcgtaaagcgtgctgcacccgattaccaagctggccgagaattttatcgggaatatctagcggattttgcgtaacaaagtaaattcccacgccttttgaacgaattaagcgcaccacctgttcaattttgtccagcaacgccgttggcgcatcgttgaacagcaaatgagcttcgtcaaagaagaacaccagctttggtttctctacatcacccacttctggtaactgctcaaacagttccgccagcaaccacagcaggaaaatggaatagagtttcggctgattaatcagcttatccgcagccagcaggttgataatcccccgcccattgctatctactcgcattaaatcctgaatatccagcatgggttcaccgaagaactggttcgccccctgctgctccaaggtcaataaaccgcgctgaatcgacccgatagaagccggcgagatattgccgtactgagtgcggaaatctttggcgttatctcccacaaactgcaccacggcgcgcaaatctttcatatccagcagcaataagcctctgtcatcggcaattttaaataccaattgcagcacgccgctttgcacatcgttcagatctaacaaacggcctagcagcaaaggcccaagatcggaaatcgttgcccgaaccggatgccctttttcaccaaagatatcccacggaataatcgagcaagcctgcggctcccagtcattgacgccaatcgcagccaaacgagccaagagtttttcagatcccgcgccttcggcaccaataccggacaaatcacctttcacatcggctaaaaataccggtacgccaatgcgggagaattgctcggccattttttgcaatgtcaccgttttaccggtgcctgtagcgccggtaatcaaaccatgccggttggccaaagccggcaaaatcgccagctcaccggttgcagaagcggttcggcctccagttttagcaatgactaacggctgctcactcatttgccttcaccttttttattctgaaacgattttattcagaaacgatagctttatgccgaaattataggcgcgaatctcagtaacatcctctgtttgccaaactgcagccccccgcttgcgagtaaagtatctagctataaaaataccgtaccacatggaaaaacaccggagcggcaaaacataaagaatcaatacgatccatcatgccaccgtgcccttcaatcatggcgccgaaatctttaattccgcgatctcgtttgatcgccgacatacacaagccgccggcaaagcccaataaggtaatcagcaacgagattaatccggcctgccagaagctaaacggcgtcgcccaccataaactggcgccaatcaggctggcgctgagaattccgccgataaaaccttctacagttttattcggacttaatttcggcacaataggacgtttgccaaaaagcttaccgaatacatattgcagaacgtccgaaagctgcaccactatcatcaaaaacagcagcagtttgatattttgattttcatagccgggaatattcagcatcagcagcgctggcgcgtggctaatacagtaaaccgcaatcatcatgctccactgaattttcgccgttcgctcgaggaaatgctgggtatcaccggataaagcaatgcgggttggaataaacagaaaagcgtaaaccgggataaataccgcaaatatcccgtaggcttccataccaaccaataaatactgtaccggcagcataatgaagaaacaccaaaacagcgcttcatgatcgccgcgtcgggttggcgtaagagtgatgcattctcgcagggcaaaaaatgacatcagagcaaataacaccacagaaccaatagtgcccagcgccatcgccagcacggaaataatacacatcaaccaccaggctcgaatgcgggcattcaggtttaaaatagtgctacgtgccgcaggagaaacgttcacgcgggaaagaataaagccaatcaaactggcgatcgtcaataaaccgaataaaccgcacagcagcaattttaattcattatcaaacgccatcatggtgccatttcctctagtgccgctttaattcgcgccagaaaagccgctttatcttctcccgcctgcaagcctgtcaccggtacgccaaaggtcgctgagcaaataaaaggcaccaccagtttggaacctttcggtaatacgcgattgaggttttccagccacacgggaactaattcgacgtctgggcattggcgagccaagtgataaatcccacttttaaagctttgaatattttctccatcaccgcgcgtgccttcagggaataaaattagcgactgattgttctccaacgtttccaatagcggcgtcagcggatttttacgcgcttcagcgcgaccctccaccgtacggcgctccaccagcaccgcgtgaaaaacatacttcgccagataacggcgtaaccgtgttttcgaccaataatccgctgctgccactggatgaacctgactgcgcaaatggcgcggcatgctcgcccagatcaccagcccatctaaatgactggaatgattggcatagtaaattctgacctgtttatctggtaacggagcaagccagcgagctcgaattccggtcagcaaacggcataaagacaccagaatggtcgccaccagtttgctactgagaataaaaggaaatttaatcattaggtggcaattccttccgctggagttcattcattaccgcgcgggtacgtaaaatcgcggtaacaatggtcccgaggccaataatccacaggcagagatataaaatccattggttataggcaggcacaactgcggcaatcactgtgccgagggttaacagagccatgcggtgttgcttagccattggcccactgaattgttgagctaaaccgcagctaccgcccaaaacgcggacataggccgtcattgcggcgaatagtgctgcggcccagcttagcgttattgcatcggtaaaagcggttaaaccgtagcccacgccaattaaaatcaaagtatcggagatgcgatccggtaaatcgttatataccgcgcccacagggcttcgtaatccgccttctaccgcgaccatgccgtctaataaattgcagattaaccgagcctgaatcatgaaagccgcggcgataagcaataggccgctgaccagcgctgaatcctgacgaaaagcgcagaagaaactgagcccagccaatgcagaaaagagaatgctaaagagggaaatgccgttgggcgttgcgccgcgctgttgtaatactctggcgaaggtcgtcgcccacgctgtatttctggcacgtattggccgacgatctttaatatcctgattcatagtcaattaactaccttgtcaccgcagaaaataatccatacaaccctgctcggctaattactcagatactattgtggtgattcctgggctatcccaatatggattctattccggccaacgttatccctaaccaagttgggttaatatacagcaaagatgtggcaataatgaggactaaaaaagcggtgagagtcgcgcttaattcgatgctaagaaagggatgattggacggaattaacgctgagagtagtgaaaaccccgcggctagttattacagcaacggggtgtcgagaactaaggtaaaactttggctgacaggatggtaataggtttaaccggcacgttttggtacggcccgatattttccgtttgcacttgcgatattttatcgacgacatccatgccttttactaccttgccaaataccgcataaccaaaatcacgttgaccgtgatcgaggaatgcattgtccgccacgttcaggaagaactgactggttgcgctgtctttatcggcggtacgtgccatagaaatggtgccgcgcagattacgcaagccgttatccgcttcgttcttgattggctgattggtcgctttttgctgcaaatccgcagtaaagccaccaccctgcaccataaagcctgggattacacggtggaaaaccgtgttgttgtaatatccgctattaacataattaacaaaattctgggtggaaaccggtgccttctgattatcgagcgctaattcaatattccctgccgaagtggtcagcaatacatggggagcagcggctgcagaagcggctggagccatggcagtcagggagatcagcgtagcgaaggtcactaaagtacgtttaaacattacggttcctttctcttagagacaaacaacggaaaagcgccttgattctaaagagctgtccccctcagcgctacccatttaccaatatttacttaacacaacggacatttctgataaaaactcgtgtaattgcggttaatgcccgaaataagccgtttatacatccaatataagtgaatagttttgcaggccagatcacgccttgcccacccattttcatttcatccgccgtttttgcgagcttcatctcgttttgattttggttaatcgttaatcatctacaaatgagagcgctctcattttgaatttacctagtcagagttacgcgatgagggacatggcgacaggatgattagtgcggaatctctgtcggtagaaaacagtagctacccatagacattggccgaaaacctcctcgtagcttcctctgatacatacatgacgaaaaaccggcgagcgcagcggatacaactcgattagatacaactcgattaataggtatgaccgaggaaacggcacattgcttatcgctttggtttatacccggcaacatttatcaatgccttggtcatgtgggattcaatctttacgtgatcgaactttaccctcgccagagccgtttggaggccaacagtgaaaaagtttaaaatcgccattattggtggcggcagcagttatacgccggagttagttgacggtttaattcaacgaatcaatgagttaccggtgacagaattagcactggttgacgtcgaacagggccgtcaaaaagtcgaaatcatcgccgcactcaccgagcgcatgctggcacgccacggcctggagcaggttaaggtcagcgtacatttctcactggatgacgccattcgcgatgccgattttgttctgacccaattccgtgtcggccagctccctgctcgcgccacggatgaacgtttgggattgaaatacaacctgattgggcaggaaaccactggcgtcggcggctttgctaaagcgctgcgcaccattccagtgatgatggacatcgctcatcgggttgaacgtttggcgcccaatgcctggatcattaacttcaccaacccggccggcatcgtcaccgaagcggtttcccgctataccaaagctaaaatcattggcttgtgtaatgtaccaatcagtatgcatcacatgatcgccaatctgcttcacgcgccttacgaagatattcaactgcgctttgccggactgaatcatatggtttgggtgcatgaagtgctgcaacggggcaaagatgtgaccgccgacgtgctgaaaatgctgtgcgacggcgcgtctctaaccatgaacaacattaaagaagcgccgtggccaccagaattcctgcgagcaatgggcgcaattccttgcccataccaccgttatttctaccaaacgcaggatatgctgaccgaagaagtggcggcagcggccgagcgcggcacccgtgccgagcaggttatgcaggtggagaaagagctgttcgaactctatgccgatccagagctggataccaaaccggagcaactcagtttccgcggcggttctttctattcggaagttgccctagagctaattcggtcgatttataataatctgggcacacaattagtagtgaatactgcaaaccgtggtgcaattcgcggtttagcagacgatgctgtggtagaaactaactgtatcgttgatgctcaaggcgcacatccgctgacatttggtcaattacctgactcaatgcatggattaattcagcaggtgaaagcctatgagcgtttaacgatcgaggctgcggtccatggcgatcgcggcagcgcattgctggctctggtcaccaacccactggtcgccaatgccagtatcgctcagcctctattagaggaggttttggaggccaataagccttatttacctcagtttaaatgatgtaaagggataacaacccgctttcaaccgccagttttgctggcggttgaagtttggaaaaacaggagcagcacatggttacgctggaagacgtcgcggtactggccggggtatcccgagctacggtttcccgcgtggtcaacggtgataccaacgtcaaacccctgacccgagaaaaagtcgagcaagcggtggccgtattgggctatacccccaatcctgcggcgcgcgcattggcatccagtcactctaatactctcgggttagtcaccacctcttaccgtggtggattttttggcgcgttgatggattttgtacaaaccgaagccgaatctcacggcaaacaattactggtgacccaagggcgagataacgccgagaaagaatggcaagctattcaacgactgtttaacctacgctgcgatggattaattctgcacgttcgcttcctcagcgatgagcggctcagacaattggcggccacccagcgcccttttgtgttactggacagactggtaagcggtctggaagaacgctgcgttatctttgatcatcgccgcgccagccagattgccacacaggttttgatcgacgccggtcataaacgtatcgcctgcatcagcggctccgctgaacgtcagtctagtcaattacgattacaaggttttctggatgcgatggccgcagccgacttaacgccggtcgcctgtctgcaaggggtttacgatctggaaagcggctatctgcgggcggatgaagcgctgcgccagtctcaagctccgacggcgatttattgctgtaatgaagaaatggctctgggcgcattgctggctatcaataagcatcatttgcaggttccgcaagatatctctctgctgtgctacgacagcggcgaacgcgcgccttttgtttctccggcactcaccagcctacattttccaattgtcgaaatggctcagtacgccacgcgtttgttgattaacccgcaaacgcccgccatgagcttcgtccccacggtgataacccgcgaatccgtattaccgccgaaataagcctcaggcgtgacggcaaccaaaccgccacgcccttggttatctatgcgtttctatcagaaagtgacgttgagctttgcccaaatagttcgcccaggctcattcaccggagtattggctgaatagccaaagccgctattacccgccaaattaaggtgctcgctgtaatccttattcagcaaattatcgataccagtactcacttttatctgcgggttaaacttataggccacgttggccgaaagtacgccaaaaccggcgctgctggcaaaatccttcccaaccacgttaccttcgttaattgcgacccggtgctggctactgaccaaacgccacagcgcggtgctgctccaattaccgttctcataagtcagtccaaatcgggcttctaatggtgaaatctgcggtaatggtcggccgtcggtattattttgcccacgggcataagccagactggcatcggttttccaacggtcattaaaggcataagccatcccagcctcaccgcccataatggtggcgtcgatattgtctgcctgactgatccgcagattcttaggatcgtatttgaacaggatgaaatcattaaccttcccagcgtaggccgaaacccaggcgttaaactgctcaccgctatactgaccgccgatatccaattgggtggttttttcacttttcacaccgtcaaaagcgctggcagaaccggtaggcccaaaggtcggggaaaatagctcccagaaatcggggaaacgttcggtatgaccgatgcctgcatacagcatcaccggcgaatcagccaaattatgctcaaggcggataaaaccggcgggtagcgtggcagtgcgctccggttcatcagcgcgtttatagttagtgactgaatgatgatcgaggcgagcaccaacgatcgctttatcctgctcattcatttcccaggtcaactcactaaacacgccgtaatgagtgaaactggcgtttttgctccagtgggttttattgtttttacgatgagtatcggtttgcgcatcgcctccggcctctagtttgatatcctgccagagccaggttcccatcatgcgcccaccgagggtgcggcgatccagattactggacatcgccatatgcggtggcgtacgtaaggtactgttatccatcacatgattgacatagttgtaatagattttggcttcaattttatccagcacttcgccaatatgatttttctcaagacgtagccccaggctttctcgtttaaactgagaaccatccataccgcgtccggcgtaccgcgcctcgccatcgcctttacccatcgtcatttccaacagcgtatcttcatccggcgtccagcctagggcaagatcggcattccacttatcccagcgggatggcacccgattgcctacaccgtctttatagtcgccagcttgggattgattgcccatcatgcgcaaataaccctgatcgccgcctaaactcaggtcgagatttttgtcccaacggccgttggaacccaccagcagactcccattaccggtcacgccggtttgctcaaagcgtggtcgttcacgttcaaacagcacggttcccgcagatgctcccgcgccccacagtaccgactgcggcccttttaccacggtcagcaaatcgtagctttctggcgaaatataagaggttggcgcatccattctcgatggacaggtgccaagcgtctccgcaccgtcggttaggatcttcaagcgggaaccgaacatcccgcgaaataccacatcaccattggtgccgccgttacgaatctgagaaaaaccgggaatggttttcagataatcagcaccgtcgctggccggaaccggttggcgcggcgttttaggcgatgtcactatggttaatggtgaatactgcggcgcggtgacggtaatcacttcggcatcattcggttgattcacaacattcgacgcaggctgatggcgaacgtcagacgcactgatagcgctgaaagccaataatgaacaggaggacgctatggcgtaagccagtttgttttttttgcaggtgttatatttgttagacattattattcctaaaacgaaataggttcatccggcaaggttttatccatgccattagaatggttatttggttattttcactatcaggaataaaaaactggcggggcgcgtggctgtaatttggaataaacgtctttggtgacaataggttctgaaataaacaaaaccggcaacgtcgcggccaataaagacacgctgcgaatatcaggtttatccgtcgcattcagtaacggcagatggatcagcagcaggcaataatcacaggccgcatggttcatcatcggcgaatgattcgacatcggcataacgtcggaatgattcattgccgccatcgctaccgaatcatgataagagttggatgggtgtgaatgataatcagacatggccgaatcatcggtgtcgatgttcggtagcagtgcggctgaatcggcgttttgagcagaggccagcgttatagacaccatcggcgctataaacagcattaatattgcgaatatccccaaccaggcagaaaaacgccgtcgctgataacctatccggctcaacgtcacgcgctgcccaagggtgtcaatcccttcaccaaaacaatccctttatccagatgaataataaaatatcgatatcatggcctcagagcattccaaccctgagttttcccgcactgaaaaatagcgctgacacgaaccataataaaggcaagagcttactggagataagctcatccggtggttattaacgcattttatttgtgatgactcgccatttttcatcactaattttcatgtattgcactaaaattcggatacaagtcacaaaaacgagccatgcctgtgctaggattcgccgccttagcgctgaaaaccggtttggttccgttttagccctatgccagttaatcctaactcgtcttttattactgacacgcaggccctatctatgaacaacagcaatcgcattcggctcacatggatcagttacttttcttacgcgctgaccggtgcgttagttatcgtcactgggatggtgatgggcaacatcgcagagtatttcaatctgccaattgccagcatgagtaacacttttacctttctgaacgccggtattctgatctctatcttcctgaacgcctggctgatggaaatcatcccgctgaaacgtcaacttatcttcggctttattctgatgctgattgccatcgctggcttgatgattggccatagcctgatgatattctccgcgagcatgtttattctcggggtggtcagcggtattaccatgtctattggtaccttcctggtaacccatatgtacgaaggccgtcagcgcggttcacgcctgctgtttaccgattccttctttagtatggcggggatgattttcccggtggtcgcggcgatgctgttagctcgcagcgttgagtggtattgggtttacgcctgtattggtctgttgtacctggctatttttgtgctgactcttttctccgaattcccggttctgggccacaaagcgaccgacgcgggcaaacccgtagcgaaagaaaaatggggcatcggcgttctgttcctggcgattgcggccctgtgctacatcctgggccagctcggctttatccagtgggttccggaatacgcgaccaaaaccttcggcatggacatcggtcaggctggccagcttgtcagtaacttctggatctcttacatgatcgggatgtgggtattcagctttatcctgcgcttctttgacctgcaacgtatcgttaccgtactggccgcactggctaccggtgccatgtacatgtttgtgtctgccgaaagcccggagtacctgagctactacattctgactctaggctttgtttccagcgcgatttacaccaccctgattactctgggctcactgcaaaccaaagtttcctcaccgaaactggttaactttatcctgacctgcggcaccgtggggaccatgctgaccttcgtggtcacagggcctatcgtggcagagaaaggcgttcacgccgcgctggcaacggctaacggcctgtatctggccgtattcgtgatgtgtctggctctgggcttctttaccaagcaccgtagccacggccatgtgactcactaaccgtcggtaataaactcattaccctcatcataaaatagtcaccattattaccgccttcccagccagcgccgtgggaaggcggttttatttctcgcgacgaaaatcaataggttcttcatttcccacatatatccggctttgcgctggcagcgtctgcgcgataatttcccccgcacgcagagaatagcgcaccggtacctgccgcctcaccgcttcaaacccattttcagccggaagaatgatcagattagcctgatgcccaatggctaaaccgtagccgcttaaattcagcgttctggcgctattgtgagtcactagcttcagcccgtcattaatttgcccgtagcccattagctggcaaatatgcagacccatatgcagcacctgcaacatattggcagtacctagcggataccagggatcaaaaacatcgtcatggccgaaacagacattaatccctgattccagcatctctttaacgcgcgtaatcccccgccgcttagggtaggtatcaaaacgaccttgcagatggatattgaccaacggattggcaacaaaattaatgccggatagctttaatagccggaataaacgcgaggtataagcgccattataggaatgcatggcggtggtatggctagcagtgacccgagcgcccatcccttctttatgagccagcgccgcaacggtttccacaaaccgcgactgttcatcatcgatttcatcgcagtgtacatccaccaaccgctgatatttttgcgccagtgcgaaggtcttatgcaaggattccacgccgtattcgcgggtgaattcgaaatgcggaatcgcacccaccacatcggctcccaaacgcaatgcttcttccagcaaggcttcgccatcgggataagataaaatcccttcttgcggaaaagccacgatttgcatatcgacccacgggctaacttcttgctttatctccagcatggcttttagcgcggtcagggtgggatcggaaacgtccacgtgggttcgcacatgctgaataccgttggctatctgccatttcagcgtttgccaggcacgctgtttaacatcttcgtgagtcaacaacgccttgcgctctgcccagcgttctataccttcaaacagcgtgccggactgattccacgccggttctcccgccgtttgcgtggtatctaaatgaatatgtggctcaataaaaggtggcagaatcagcccgccctccccatccagcacctcatcgccggaaggcggttgagttagctgctcatcaatgccgataatcttgccctgcgacaggttgaactgccataaaccggggcgatcgacgcgccgcacactgtggataattcgcaccttcttcccagtcatccttcctcctgctgccctaaccgctttgacggtaaaaaatatcgctttcctttagcttacctaactcgcttccccacgttgccttttatttatttaaggtaaaaaaaccacagaactgacaccattcagctaaagatgaataaaatccacaacttatcaaaaaacgttataaatcatcaatctaccaccttagaggtatatgaggggcaaattgatttgcatcaataagcgcaatagcggggagattaaggtaagcgtagaaaactaaaaattgaggcaaaaatgagcaaagtcaaacttgccgtcatcggcaacggaatggtcgggcatcgctttattgaagatttactcgataaagcagacaaagacgcattcgacatcactgtattctgcgaagagcctcgcatcgcttacgatcgggttcatctctcgtcctatttttctcaccataccgctgaagagctttctctggtgcgggaaggattttatgagaaacacggtatcaaggtattagtaggcgaacgggctatcactatcaatcgtaaagagaaagtgatccactccaacagcggtcgcactctctattacgacaaactgatcatggccaccggctcttatccgtggattccaccgattaaaggcagcgaaggtcaggattgtttcgtctaccgtactattgaagacctgaatgcaatcgaagcctgtacccgccgcagtaagcgcggtgccgtggtcggcggtggtttgctgggtctggaagccgctggcgcgctgaaaaatctgggcgttgaaactcatgtaattgaatttgctccagtattaatggccgagcagcttgatcctatgggcggggatcaactgcggcaaaaaattgaacgcatgggcgttcgggttcataccggtaaaaacactcaggaaatcgctcatagcggcaccgaatgccgtaaaacgatgattttcgccgacggcacctcgctggaagtggactttatcgtcttctctaccggtattcgcccgcaggataaactcgctcaccagtgcggtctggctacggcgcgccgcggcgggattgccatcaacgattactgccagacctccgatcccgacgtttatgccatcggtgaatgcgcatcatggcaggaacgcaccttcggtctggttgctccgggctacaaaatggcgcaggttgccgtcgaccacctgctaaaccgggaaaatgccttccagggcgcggatatgagcgccaagctgaaactgctgggcgtagacgtcggcggcatcggtgatgctcatggacgcaccgaaggcgctcgcagctacgtgtatctggatgaaagcaaagaaatctacaaacgtctggtggtcagcaaagacaacaaaaccctactgggtgcggtgctagtgggcgataccagcgattacggcaacttgttgcagttggcgctgaacaaaatcactttgccggaaaacccggacagcctgattttaccgtctcacgcaggcagtaaaccggctatcggcgtagactctttgccggaaacggctcagatctgctcctgcttcgacgtcaccaaaggcgatattattcaggcagtcaataatggttgccataccgtggcagctatcaagtcggcgaccaaagccggtaccggctgcggcggttgtatcccactggtcactcaggtacttaatgctgaactgagtaagcaggggatcgaagttaatcaccatctgtgtgaacacttcgcttattcccgtcaggagctttatcacctgattcgcgttgaagggattaaatcctttagcgaactgctgagcaaatacggtaaaggctacggttgcgaagtgtgtaaaccgaccgttggctcgctactggcatcatgctggaacgattatgtgttgcagactgaattaaccccgctgcaagacactaacgacaacttccttggcaatatccaaaaagacgggacttactcaatcattccacgctccgccggcggggaaatcactccagaaggtctggtcgctatcgggaatatcgggcgggaatataacctgtataccaaaattaccggttcacagcgtattggcctgttcggcgcacagaaagacgatttacccgcaatttgggccaagttaatcgacgctggcttcgaaaccggccacgcctatgccaaagccttacgtatggcaaaaacctgcgtgggtagcacttggtgccgctttggcgtcggtgacagcgtaggcttcggcgtgaagctggagcatcgctataaaggtattcgcactccgcacaagatgaagttcggcgtttctggctgtacccgtgagtgtgctgaggcgcaggggaaagacgtcggtatcattgcaacggaaaacggctggaacctgtatgtgtgcggtaacggtggcatgaaaccacgccacgccgacctgctggccgccgatctggacgaagccacgctgatgcgttatctcgaccgctttatgatgttctacatccgcaccgccgacaaactgcaacgcacctcggtgtggctggagagtctggaaggcggcatcgcctatctgcgttcagtcattattgacgacaaactcggcattaacgatcagttagaggccgatattgcccgtctgcgcgaagctgtcatctgcgagtggaaagccactgtggaaaaccctgcggctcaggtacgtttcgctcactttatcaatagtccattacgcgacccgaacgttcaggtggttagcgaacgcgaacaacaccgccctgcccgccctgatgaacgcattccggtgcggatacttgaactggagaataaccaatgagccagtggatcactgtatgtccattagaggtcattttaaccggcaccggcgtctgtgcgctggtcggggaagaacaggtggcgatatttcgcccttacgaagatgagcaggtttttgccatcagtaacatcgatccttttaccgaagctagcgtgctgtctcgcggattgatagccgaacatcaaggtgacctgtgggtcgccagcccgttgaaaaaacagcattttcgtctacatgacggcttctgtctggaagatgaaagccgctcggtacgtcacttcgacgttcgggttcgcgacggcatggtgcaagtgaaggcttaagcgatctgatgcggcgacacggtaaaaattatcgcgtcgtcgacgatcaaaataattatttttatcttttggatcaattatgtacgcagatactttgaataaatgtgccgctaatgcagcgcgcatcgtaaaactggcaaaagaaagcccgctgggcttttggattagctcggcaatggcgggagcctatgttgggctagccatcattttgattttcaccttaggcaacctgatcgatccggcgctgcggcctttagtcatgggggcaacctttggtctggcgctgacattagtcattatcgctggctcagagctgttcaccggtcacaccatgttcctgactctcggcgtcaaagcaggcaccatcaaatccagccagatgtgggccgtattaccgcaaacatggctaggtaatctgctgggctcggtatttgtcgccctgctttactactacgctggcggcagcctgttaccggtagataccagtctggttcacgctgcggcattggctaaaaccaccgccccagccatggccttattcttcaaaggtgtactgtgtaactggttggtttgcctggcaatctggatggcaattcgcgttgaaggcgcagccaaattcctcgctatctggtggtgtttgctggcctttatcgcttcaggctacgagcactccgtcgctaacatgactctgtttgctctgtcctggtttggtaatcacagcgaggcttacaccatgagcggcatcggccacaacctgctgtgggtcactctgggtaacactctgtccggtgcggtctttatgggtctgggttactggtacgctacgccgaaagatcagcgtccggcagcggtcagcgccactgcgccacaaaccgcgaagtcataattgcgacggccagccctacttcggggctggcatatgccgccacagaattaaggattgctgatggattacctaccgattttctgccaactgcaccacaaagactgcctgctggtaggcggtggcgatattgccgaacgcaaagcgcgcctgctgttagacgctggcgcatgggtgaccgtcaacgcctgtgagttttcgccccagtttcacctgtgggcagaacagaaccggataacgctggtgcatggggaatttgccccagaattattggcagaaaagtggctagtgattgccgccacggatcgggttgaggttaatgcgctggtgtatcaaagcgccaatcagcaacgaattttctgcaacgtggtggacgatcctaaacgcgccagctttatcatgccgtcgatcatcgaccgctcgccgatcatgattgcaatctcctccggcggtaaagcgccagttttggcgcgcctgctgcgtgaaaaactggaagccatgctgccacagcatctcggccagctcgctcgtatagccggtaatctgcgtcagcgagtcaaacggcagttctccgccatgaccgcccgccgtcgtttctgggaaaaactactgtctcacgaccggttggcacagtctctggccaatgacgatcaaactcaggctaatcaattagtcgagcagctctttagcacgccattagaagatcgcggcgaagtggttctggtcggcgcaggccccggcgacgctggtttactgacgctgaaaggtttgcagcaaatccaacaggccgatgtagtggtttatgatcggctggtttccgatgaggtgatgaatctggtacgccgtgacgccgagcgcatttttgttggtaaacgcgccggacatcactgcgtaccgcaagatcaaatcaatcaaatcctgctggaacaagcgcagcaaggtaaacgcgtggtgcggctgaaaggcggcgatccctttatttttggtcgcggcggcgaagagctggaaaccctgtccgacagcggcattcctttctcagtggttccgggcattacggccgcatccggttgttcagcttacagcggtattcctctcactcatcgggatcacgctcagagcgtacgtttggttaccggtcatgccaaagccgacggtcagttagattgggctaatctggcggcggaggagcaaacgctggtgttttatatggggttatcgcaggcgagtgaaattcagcggcagctgattcgccaaggtatgagcagcgaaacgccggtcgctctggtagaaaacggaacctcgcgtcgtcagcgtgtcgtcagtggggaacttagtcaattagcgctgctatctcagcaggttagcagtccaagcctgattattgtcggcagcgtggtcagcctacgggaaaaactgaactggttttcatcccaagaacaaaccaacccaaatatgcagcaggaacaggctgaacaagccggttaatcctgatagttataaaaattgaccatgaaaaaagggacgagcttatcgtcccttttcttattgatgcgattcagtgagaaaacgctcttgaatcgttaccgcttacggatgagcgacaaaaccaatggcttcatacactttcgccaacgtttcttgcgcacgcgcacgcgctttagcagcgccatcacgcattactgactgaaggtaagcctcatcattgcgatattgatgataacgctcctgaagctcgctcagcatgccagaaaccgcttctgctaccgcacctttcaaatgaccgtacatttggccttcaaattgtgcttccagctcaggaatagactggccggtcacgccagacagaatatccagcaaattggaaaccccggctttttccttcacgtcatagcgaattaccgccggttcatcggaatcggtcatggcgcgtttgattttcttaaccacagatttggtgtcttccaacagttcgataacgttattacggttatcgtcggatttagacattttcttggtcggatcttgcaaagacatcactcgcgcgccggctttaggaataaaaggctctggaatcttgaagatgtcaccgtaaatcgcgttgaaacgaccggcgatatcgcggcttaactccagatgttgtttctgatcttcacccaccggcacctgattggtttggtacagcaggatatccgccgccattagcactggatagtcaaacagaccggcgttgatattgtccgcatggcgcagtgacttgtctttaaactgagtcatgcggctcagttcgccaaaataggtatagcagttcagcgcccagcccagttgagtgtgctcgggtacgtgggactgaacaaaaatggtacttttttgcggatcgataccgcaggccagatacagcgccagcgtatccagcgttctttttctcagtaaagtcgcgtcctgacgggcagtaatggcatgcagatccacgatgcaataaatgcaatcatagtcatcctgcatctgtacccactgacgcagagcacccatgtagttgccaatggtcagttcaccggacggctgagcgccgctaaatacaatgggtttactcattttacgcttcctgattttttaaagatgacagcccaatcgtgggcaacagatcggcaaagtgcgttaaaacgcgatccggatgactcgtggcaatagattcgccatagttatatccgtaggtcagccctacgcaagggcaaccggcggcctgagcggccataatgtcattgcgggaatctccgacaaacagcaattcgctggcgcgcagccccagttttcccagcatcagatacagcggagccgggtgaggtttcttctcgacaacatcatccccaccaataaccagtgagaaataatctgcgatacctaaagaagccagcagcggcgcgacaaacggcgtcggtttgttggtaatcagccccatcggcagaccggaggcggctaactgtgccaacgtgtcttttacctgaggaaacaattggctaccgcgctcaactgtctgggcgtagtagccatcaaagagtacgcgagtgcgctggcaaatctcatcctgaggctctacgccagcccaacgcagcgcgcgctcaactaagacgtcggcaccgttgccgatccaggtggaaactcgctccaaacctgctttaggcaacccctgatgctctaatgccatatccatcgcgctggccaagcccggcgcactgtcaactaaagtgccgtccagatcaaaagccagaccgcggatagagttaaattcagtcatgagccgccatcgccaactcgctgcgcattgcgtcaatcaccgcagcgtaatcagatttaccgaaaatagccgaaccggcaacaaacatgtctgcacctgcggcggcgatttcacgaatattatcgaccttcacgccgccatcgacttccagacgaatgtcataaccgctggcatcaatacgttggcgcacttgacgcagtttattcaaggtttcaggaataaacgactgaccgccgaagcctgggttaacggacatcagcaaaatcacatccagtttatccatgacataatcgaggtagctcaaaggcgttgcagggttaaataccaaaccggccttacagccgtggtctttaatcagttgcagagtgcgatcgatgtgttcgctggcttcaggatggaaagaaatatagctggcgcccgctttggcaaaatctggaacgatgcgatcaacaggtttaaccatcagatgcacgtcaatcggcgcggtaataccataatcacgcagcgcctggcacaccatgggacccatcgtcagattgggaacgtaatggttatccatcacgtcaaaatgaaccacatcagcgcccgcagcaatcaccttcgcggtatcttcacctaaccgggcaaaatctgccgacagaatggacggggcaatcaaaaactttttcatccgcttctccaaactttttatctgccccacaaagctcacataggcttcgggaagcacgagggtttgtatccttaccaggcgggaaatcccacttagctgtacagcgccaaaagctcgttcactttgctacgaccaagaatattacggctgatagtgcggcgcgctttcaccacatgtaatgacgcctgatgataccaatctcgcgtcaattcagtatcgtgattagaaataagcactggaatccggttttcagatgaaagctgataagccagacgagccagatttttttgatctgcaatgccaaagttattggtgtggtacgccgtaaagttcgccgttgcagatagcggcgcgtaaggcggatcgcaataaacaacggagccggaagctgcttttagcaaggtttcctgatagtgctcgcagacaaaaaccgcatttttagatttttccgcgaaccaatacaactcggcctcagggaaatacggttttttgtaacgcccgaaaggtacgttgaactcaccgctcaaattataacgacacagaccgttataacaatgacgattcagatagaggaacaacaatgcgcgccggtaaggatcttcacaggcattaaactcatgccgaatcaggtaaaactgatcggaattgttgtactcatcggtaaataaaagacgagagtcacgcacaaaatcatccgtgcgtaacttcactatgttgtagaggttgattaggtcgctgttgatatcggccaaaatatacgattcatactcagtgttcaaaaacactgaacccgcacctacgaatggctcaatcaagcagtctcccgctggcagatggcgtcgaatgtcatcaaccagcggatatttcccaccagcccattttaaaaaagcgcggtttttcttcatgccgtcagttagctacttaataattcagagccgcagattgtactctgtttcagacagcacatcagcgcacaaataaaaatgatttattttttcaggtcttgctgcacttggtgcacaggtttgacccacggttttttcgcctgaacgtcggctggcaaactcgaaatcgccttcttcgcttccgctgaagtagcataatttccactgaccaacacgtaccaaggcttaccatcacgtttagtttcgtaaacctgatagtgagttaatttttgctgtttcgcataggcattcagcgtatcggaacgagaggcgctgcttaactgtaaggtaaagtggctacctggcgcgttcttcaatgccccaccgctgctggctggtgctgcagtatttttggccgctgtactaccagtacccgctgcttgggtatttttatgcgcattagccacaggtttagcggcagttttctgcgcgggacgcgtggtgttatcacgtactgctggcgttttgatctcttttgaagaagatacggtagccggtgccgttggcaacgtcgatgtcaccgcgccattcatattctgtgaaaccgaatccacctgcccctgctgctgagacagtgcatcagacatgtttcccggtaaatcaacgcgctgggttggcgcattaccattcgccattggctgtgcttcagtaggggtggatgaaaccggcggagccgtcaactcttgcggctggccactattctgtacgccgttgccgtcatgaccatcgctggtgttgctcgccgtacccggctgagcgccactgccgttggtcagtgaagaggaatcagaaagattgatatctctggccgcaacgttaggattctgctgagaagcttcatgctgcgttggcgcttttaacgcggaaccgatagcaatgatgatcaacagcaacaccaaaataccaataccaatcatcaaatgctggcgtgagagagcaattttggggccgttcgaagtcttgcgcgaacgcgtaggacggcgatcgctggtatcaggcttcagatcgtcttccggttttaactcatccatctaaaccctccaactcgaggcaaaagcctaccgttgcatacagcgacggtccggcagattaagttgactgacaacaaagagaccagaacggacctttgcgaagaatatgatgtttatagcatacaacatcataatacttatgccatttaccctgccagacactcggcaatagaagcaaggactatctcgtgagagatgccgccgcgtacctctgatttgccaatagcagtaggcagtaccagccggagttcacccgccaatacttttttatcgcgcatcatgtgcggcagataagattctggtgccatctcctgcgggccgctgaccggtaaaccggcacgaaccaacagtcgtttaattcgttcaatatcactggaagagaactgcccgattaatcgggcggtttccgcagccataaccatacctgcggcaacggcttcgccgtgcaaccacactccgtagcccatttcggcttcgatagcatggccataagtatgacctaaattgagtagcgcacgcagcccattctcttctcgctcatcggcagcaaccacttcggctttcagctcgcagcagcggcggatgcagtaacccagcgcatccatatccagcgccagcaacgcgtcgatgttgttttccagccagacaaagaattcggaatcaagaatgatgccatatttgatcacttcggccaggccagaagcaagctcacgagatggcagggttttcaggcaatcgagatcaacaatgaccgaagcgggttggtaaaacgctccgatcatgtttttgcctaacgggtgattaaccgcagtttttccgcccacagatgaatccacctgagagagaagtgtggtagggacttgaataaagcggacgccacgctgataacaggcagcggcaaaaccggtcaggtcgcctactacaccaccgcctaaagcaataagcgtagtatcacgaccgtgcggtttttccagaagggcagaaaatacctgctccagaacgctgagagatttatactgctcgccatcaggcagaatcacctgatcaactcgaataccgccttcctccagcactgcccggatagaatccagatagagaggagcaagcgtttggttggtaaccagcattacctgatcacccgccttcagcggtttaaaagaggccggatcgttaaacaatcctgcggctatcgtaatagggtagctacgctcccctaacgtgacagtaatcttctccatgtcgcgctcagtgaccttcttaacgtaacttaactgacacccgaaggcataagtagaatgctaaaatcaattactttccagcatgttgatgatctggttagcaacaactttcgcgctttgatcgtcagtgcggatggtgacatctgcaatttcttcgtacagcggattacgttcttttgccagtgcttcaagcacttcacgtggaggcgcatcaacctgtaacaacggacgttttttgtcgcgttgagtacgagccagttgcttctcgatcgtggtttccaggtacaccacaacgccacgggctgacaaacggttacgggtttccttagacttcacagaacccccaccggtcgccagaacaatgccctgtttttccgttagttcattaataactttttcttcgcgatcgcggaaaccttcttcgccttccacgtcgaatacccagcccacgtcagctccggtacgtcgctcaatttcttgatcggagtcgaagaactccatattgagttgctgagctaactgacgaccaatagtgcttttgccggcacccataggcccaaccagaaagatattgcgtttctctgccatgtttttggtattactaagactattcgttaatgataacccgccccgccaatcacaccagcggcgggacctaaactgaaacctcataagcgatagtgcgagatcagacggaaaattatctcagcacttctggtagtttggcaaccgaataaatcgttgtacacgtcgtgggagggaaaccatacgtttttatcggcgtatcaacgttacttaaaacctcggagctcaattcggtaacccttgtaagctaaatacgtcgcagcgtcaaacttagaagtccccaatcacacaaaaagttgtagatcatcatcaagaatagactctttttatctattgcctacccaagtgcgctaagtgttaattaatcggggtgtgatgaaaatgaccaactcccgcctgctctgcgcgttggcatcctgtttaaacaaattgcccagcagagggatattggacaaaaccggcactttatttgcaccctgagtatttttttgctgaaagataccacccagaacaatcgtctcaccgtcatgaacggtaatttgcgttttaatttcctgtttatcgatcgccagtgcctcaccttcaccgcgtttaatcgccattccgggcatattctggctaatttttaatttcagggtaatttttcccgcagccaaaattctcggcgtgacctccattcccaatacggcttccttaaattcaatagtggttcccccgtttttgccattggtgacatgataaggaatatcggtaccttgtttgatgctggcggtttgctggtgagaagtcatcagccgcgggctggcaatgatttccacctgattttcttgctccaaagcgcttagctccaaatccaacaggcggccactaatacgcgccacgtgaaacccggcggtcaacgcgctgttttgaataggtaaaccgacgttaaaattatttattttgagtggggcactttgcccttcactggcaggtagcccccagcgaacacccagttcatgcaggctttcactgccgatggtgacgatatgggcagcaagttgcacctgctgtagtggcgaatccaattctgccagccaagatttcataacttctatcgattctgcggtatcacgaatcagcaatctattggtacgtttatccgccattacccgccccttatcggacagtaatccgccctgcccgttgttcaggctggcggcaacatcttctacgttggcatgctgcaaaatatgcgaataattgctgagtaaatcaggttgcactgcttttctggccttagccgcagcttcatcaaccattaacctttctgaagcttcctgtctggtcatcaccaacaggacattcccttcctgttcggcaaccagattacccatgcgcatgacggtttttaacgcctgcgaccatggaacgttttccaaacgtaaactcaggctaccgccgacgctggcggacgtcaccagattcatatattgataatcggctaaggcttgcaatatgacggataccggggtctgttgaaatgtcagagacaccgagggttcacgagcttcactgcgtgttaataagcagaggataaatagcagagatagccccgcccaacgcaaaaatgttattaaatacaacgtggttaaatacaatattggtaaacacataggcaaacatccttttaataccgttgtttcatcctttattacccggttccattagaaaccaggataccggcggtgacatcatcttgcaggaaccgtccattccgctgtaactcatattgatttgccgcagccctatgtgcgttacgcgccagtgactctgaataaattcgccttcagccaaacgacgccattcgccatccgacttttccaaccagacacgatattcacccggtgcgccgactatccctcgcagcgaccattggctcatagcagcatcagcacgctctcggcaggaaagcgtgatgaccggttggaacggattacggagtggaacaaactcagaagtggctcgactgaccgccatcatcgatgccattaccatcaccgacgctattaatagtaagtttttctgaccgtttcttgtcattctcatcctcctcgtactgccctcttaacctcagtctgaggtttaatcccgacgcttccgcagtaatatgtaaatgctctatcaaaaaggggggataaagagctttgaggctccccagcaagtgaatggctccagagtaatccatactgagaagcccctcccattgcgatactcctaccttatttttgttttttacctctaactgttgccatcgtaatacctggccaccggttgcaaccacccactccccaatatggctgattaaagatttagtcgggttttcagccgtttttagttgctgatacaaatgccacgcttcgcgctgctgtccaagctgatccagcgtgggcatctgggcgatatcctgttgccgctgcgccagagaaattcgttgcgtttcaatgtgttccctttcgttgactctgagcaacagctccggtctgatgagcacggcgtagcacgtaaaaccgataaataaggttgtaatgattagccagagataaagcaccccgcccgattgactcatccagcgtagataataattattcatcgaccagactccccgaaatccagcgaaccttgatcgcaaaacccccattgttttctcgctgctgtatatcgtgaacctgcgcgttatcccaatggtttgcggttttctcctttgtctccgttaatttttcatatagctgaccaattgctggatagtcacgacagatggcatcaaaatccgtcgttttttggtcatgtactaattgtgtgatccaacaatctgtcggcatggattgagacagagtattcaacaacacaagataatgctgagttcggcgggagatttgcctatcgcgatggtgatgttctttgagtttttgcaactcagtcacccgtttttgaattcgttgatgcaacgagtccagcgctgattgacgatgggataatttgccgatctccgccccacgctcaaccctttcataacgcaacaaaaaagtaatacatgccaatatcaaggctgtcatcgctaaatgtcctatcagcaaatttcgccataaacgatagcgtgcctgttgtcggctaacgcgccagggcaaaaagttaacttgatacatcggtgtcctccgggcgaatagccaaccctcccgctaaagcaaaagctccgggcaaaataggaagtggcggctgttgctgtctaaaagcaataaaaggagaccagggaagcgtattctcagggataggttcatcgccaatactgctgtaataaacaccgaaagctggctcaccggttggcgggttcaaccgatgtaattccgtcaaaatagccttggtatcgcttccctcctgcgccgtaatcaaaccatagcgaaaaggcatatccgcagaggtagtccatagccattcccgctcaatacggtgaagtagtagatgtcgaggcggtaatttggcggctacggccatataacgaagcgcgcagggtgaaatatcaatcgcatcaggcatgaagtttgcctgctgcaggcaatcctgccagcgagaaatatcctgctggcgagccgcagtgattaacagctgccgttcatcggcgctatttgtgcggtaatccaacgccagagtttggccactcaaaggaaactgccgagcggcggcgttataaataaactggctgcgctcaggttctctcagccgtttatccgggcgaggaaagctttgctgtaatatgcgctgaaccggcaaggcaatacgtaaagaaatatgtcttggtaattgccggcgtaaatgcgaaagcaactcgctcaacgcctctaaatgttgtaaattcccattcagtaaaacgccgtccggtaatggctgttgccaccaatggcgcagttgccagccatatcgtcgcctcaataccgctaacgcccggacgcagttcatttgaatatccagcccaacctgccatattttctgtgcgcacatcttcatcgacctccatatcgagagagcataaaagaacgtatccacggtgcatggcttgcctttatactacggcgcggttgtttataaactgcccaaatgacattgaatgggaaatctcaggtgaagttcgtaaagtattttttgatccttacggtgtgttgcattttactgggagcagcctcgatatttggcctgtacaaatatattgagcctcagctacccgacgttgccacgctgaaagacgtccggttacaaacacctatgctggtgtatagcgccgatggcgaattgatcgcccaatttggtgagaaacgccgaattccgctgtctttaaagcaaattccgcctgaaatggtgcacgcctttattgcgacggaagatagccgtttctatgagcaccacggcgttgatccggtcggtatattgcgtgccgcatccatcgctttagtttctggccgcgcctctcagggagccagtaccatcacccagcagctggcgagaaacttcttccttagcccggaacggactttgatgcgtaaaatcaaagaggcctttctggcagtgcgtattgagcagttactgactaaggatgaaattcttgaactgtatctgaacaaaatttatcttggttaccgcgcctatggcgttggtgctgcggcgcaggtatattttggcaaagaaattaatcagttaactctgagcgaaattgccatgatcgccggtttgccgaaggcgccgtcgacctttaacccgctttattcgcacgatcgtgccgtatcgcgtcgtaatgttgtgttatcccgaatgctggatgaaaaatacattactcaggcgcaatacgatcaggcacgcagtgaacctctagtcgctcattatcatgcgccagaaatcgccttctcagcgccttatctggctgaaatggtgcgtcaggaaatgatcaaacgttatggcgagaatgcctataccgatggttatcaggtttacaccactatcaccaaaaaactccagttagccgctgtggattctctacgagccaacgttttggcctatgacatgcgccacggttatcgcggcccgtcaaacgtactgtggaaagtgggtgaagccgcctggacgcagcaacagattgtcgattctttaaaaactctgccggtttacggcccgctgcgccctgcggttgtgactcagacgacggctgaacaggcgacagctatattagccgacggcagcagcgtcacgttgccaatggccgggatgcgttgggcgcgagcgtttaaatccgatacggctcaaggccctacgccgaaacgcgtgactgatgtagtacaagctggacaacaaatctgggtgcgtcaggtcggcgatatctggtggctggcgcaggtgccggacgtgaactccgcattggtttcaatcgaccccaataacggtgcaattaaagcgttggttggcggttttgactttaaccaaagcaagtttaaccgtgcaactcaggcattgcgtcaggttggttcgaatatcaaacctttcctgtataccgctgcgatggataaaggcttaacgctggcgaccattctcaacgatttgccgattactcgttgggatgccggtgcaggcactgactggcggccgaaaaactccccgccgagctacgatggtccaatccgcttacgtcaaggcttaggtcaatcgaaaaacgtcgttatggtgcgagccatgcgcgccatgggcgtcgattatgctgcggaatatctgcaacgcttcggtttccctgcgcagaatatcgtacattccgagtcgctcgcgctgggttccgcgtcctttactccattgcaggtcgcgcgcggttacgcggtgatggcaaacggtggttatttggttgacccttacttcatcactaaaatcaccgatgaagccaataatgtcctgttcgaagccaaaccgaagattgtgtgcaatgattgcaatttgcctgttatttacggcgacacgcagcgttctgtggtgctttctgacgacaacgtagagaacgtggcaacctcgcagaataataccgcaagcaccgttccgatgccggagctagagcaggtttcgccgtctcaggttaaacaagatagcgatcagcagtatgcaccgcacgttatcagcactccgctggcgttcctgattaaagatgcgatgaataccaacatcttcggcgagccaggttggatgggaaccggctggcgcgcgggccgcgatctgaaacgacacgatattggcggtaaaactggtactaccaacagctcgaaagatgcctggttctctggttatggcccagataccgtaacgtcagtgtggatcggctttgatgaccatcgacgtaacctcggccgcagtaccgcttctggcgctattccagaccagatcgccggcggtgaaggtggagcgaaaaccgctcagcctgcgtggaatgatttcatgaaagtcgctctggaaggtatccctgaacagaaaacaacgccgcctccgggcgtggttaccgtggtgatcgataaacgtaccggcaagctgtctgacggcggttcgggtagccgacctgagtactttatcgaaggaacgcagccgacggaacacgcggttcaggaagtgggtacgacgctcatggacaacggccagagtcaggaattgttctagttgggagccgcgctagccggaaacagttttaacggtattcgcgaataaaaaaccggccagtcttcaggattggccggttttttttatcattccaaaagagaaagttaacgtgaaagagtcgaattaaagaaggcctgagcgaggaataacgcgctcacattacgcgcctcattaaaatcaggatctttcagcaacgccatcatattcgcaatcggccagcgcacctgcggcaaaggttctggctcatccccttccagactttgcgggtacaaatctcgtgcgacgacaatattcattttgctggaaaagtaagatggggccatcgtcagcttggtcagataatcaaaacgcttggcaccaaagccaacttcttccatcaattcacggttcgccgcatccagaacttcttctcccggatcgattaaccctttagggaaccccagctcataggattcaattcccacggcatattcgcgaatcagcaacagatcttcgccgataatcggcacgatcataaccgcttcgcgattggaggggcgcattcgttcgtaaagacgacggacgccgttactaaactcaagatcgaccgcctctacgttaaataagcgggagcgggcaaccgtttcgacattaagaattttaggtttttgcaggtgtttcatgatagccccgaatgaataattcacctctaatatgacgttttattagggcgtaccagcctgccaaaatgtgcttcaggccaatcttttcctgtccagaataatgctaacgtcttgggtgcagggatagttttaaaacttgatcacattgtgcgttaatgagaacctttatcgcaacgccgttagatataatttacccgtttttaacatgacaatcggtttagtcaaaatttagtcggttagaaactggcctatttaggcagcaagaacgttaaagtatgaagatgaaaataggaatatgctgatattacccgcgtattacccctgttatctttgtcgcctaacaggcagttgaagagcccctacaccagatcatatcgctgagcagaatgccgctatacccgctcacgaaataactcttccgtatgcctcgacacgatttttatgcataatatgcattctttcatagagttaacgaggtttggtagcactcggatggggatgggatgagcacaatagtgttgatattggccttactcttgaccagccttgtcgctgttgcattgctatggtggttcaaatatcaccaaatctctgccgttcccgtggcgctcccgtttgtcaaacccacgcatcgtacccttacgcctgaagaacgcgtcgccgtcgagaattacctgcttaatcaatccgaaaatggcacctttaaaaagctgccgggtctggattcacatctggatcaagggcattcgtcctcgtctaacgagctggcgttgatcccggaaagcgataatgtctatgccgtcacccgcgctattacccgctacggcgtggctagcgatgaaccgaataaatggcgttactaccttgatgccaccgaagtgcatttacccccgttctgggaacaattcatcgcgcaggataattacgtcgaagtcattcagacaaaaactatcccattggtgatctctttaaatggtcactcccttaaagatcacacgttggaagccccaacgccgcgagtcgcccagtctgcgccacaaaatgcgtctatccgtaaagaagacagcgaacacgtcgccttggtcaatattcgcaaggaaacgccggaagaacatgcgatttacgggcctaccggcctgagagaagcggcgactatctgtttggctttgctgcttctattcctcagccttattagtcctggggtagtattgccatggctgattcttgtctctatcgccctgctttcctgggcctgctggaagttattccgaccactttcagaatcggatttaaaggaagttcattgcctgagtggcacgccaaagcgttggggattatttggcgagtccaatcaagggcagatgaataacatctctttgggcattatcgacttgatttatccgcctcactggcaggcttatttcgcccacgatctgggtaagaaaaccaacgttgatatttatctaaatcggcaggtcgtccgtcagggacgctatttatccctgcatgatgaaatgaaaaattttccattgcagcgctggggcaaaaacctgacgttaatgctcggttcattagcgattctgatattgctggtcgtttatgttccgctcggtctgccgctaaaactcagcatggcgtggattcagggtgcacaaagccagcaggtcactagtgtacaagctttggaaaagatgccgcttcgcattggcgatatgctgaaagctcagggaacgggtatgtgctatgtgccgcctaacgctctcggcccgcataattttgcttttacgcctttcgattgctctagcatttactggaataccgcatctacgctaccacagcctgagtcggaaactattgaaaaagccgctgcactgctggcgacggtcaatcagcaattgcacccgcaggacagcagcgatcctaacgttaacccacagttagcgacagcgattgaaaagtccgggatgattctgctgaataacttttccgatattgtactgaaaaccaaagagttatgcagaagcgaagccgattgcgtacgtctgaaaaacgccttggtcaatttaggcaacgccaagaactgggcggcgctcaccaaaaaagcacagtctggcgcgctcaaaggtatgaacgtgttattacgtccggtcagcgccgatgcgttggaaagtttggtgaataccgctacctcttccttcgtttaccgcgaaactcatctggctaccgaggcattaaatagcccgccgccgggcggtttcctgatcagcagcgatgaaggcaaacagctggtcaaccatcctattcctgccgttccgctgtttgattacagtgcgttagagcagtggcgagaacttcagcggctctctggtttgctgctgaataccccgtttaaagctgaaggagtcatcaccagcattaccgttgatgccaacggtacgcgtcatgttactttgcatagcgaaccggacgttatcacgctcagccgctatttaggcaccagcctgttgttattcgccttgattatttgcctgtccgtcaacggctacctggtcattaagcgtatgcgccaaaatcgcacccgcatggaagatattcaacgctattatgatagctgctttagcactcaccttaccgctacgccttatcttcgctaagcgccagaatccgcctacgcagcatcagccacgcgcagaccttgtcattttggtatgctaggctaaatattatctgctaaatcgtccgtcgctgttccccctcaaacagccagaatgcctgcttattttattggagtgaccatgccactgaatgttaactggcaagatatcgataccgtattattggatatggacggtactttgctggatctggagttcgacagctatttctggctaaaactggtgcctgaagctctaagccagcagcggaatatccctttggagcaggccaaggcaattattaacgatgaataccacgcggtgcagcacaccatgagctggtattgcttcgattactggtgccaacgactagatctggatatttatgccatgacgacgcaggtcgggtcgcgcgccagtttgcgtcaggatacactgccgtttttgcaggaattacgcgactccgggcggaaaaccattttactgaccaatgctcatccccatagcctgaatattaaagttcagcataccggtctcgatcagcaccttgatttgttactttccacccatatatttggttatccgaaagaagatcagcgtttgtggcaggccgtggctcaacatatcgattttgaccccgccagaaccttatttgtggatgacagcgaagccattttggacgcggcaaaaacctttggtatccgttactgtttgggcgttgaaaaccctgattcaagctgcgcgggcaaagtgtttcaaagccatcccgccatcagcgactatcgccaactgttgccagccattcggcaccacagcgcggcttagcagacaggagattctgtgaaagaaaaatccgctcccgatgacgccgttcgtctggataaatggctatgggctgcgcgtttttacaaaacccgcgcaatggccagagagatgattgatggcggtaaagttcattacaacggccagcgggggaaacccagtaaactggttgaattgaatgcggaaattcggttgcgacaagggaatgacgagcgcacggttcgaattctgtccatacacagccagcggcgcggtgcggcggaagcgcaggcaatgtatgaagaaacggaaaccagtatcgccaaccgggagaaagtagctcaggcacgtaaactcaatgctctgaccatgccccatccggatcgacggccggataaaaaagagcgtcgcaatctgatcaaatttaaatacggcgagtcggaataaccggctgcttttaagagagaaaactatgtctaatcacgaccaattacaccgctatctattcaaccatcatgcggtacgcggcgagctggtaaccgttaatgaaacttatcaacagattatcgcgaaccatgattaccccgcgccggttaaaaagctgctgggtgaactgttggtcgctaccagcctgttgaccgctactctgaaatttgacggcgatatcaccgtacagctgcagggcgatggcccgttgactctggccgtaatcaacggcaataaccagcaggaactaagaggcgtggctcgcaccaacggcgaaattgccgaagacagctcgctgaagcaaatgattggtaatggttatatggtgataaccattacaccagctaaaggtgaacgttatcagggtgttgttggcttggaaggcgacactctggccgaatgtctggaaagctatttcatgcagtccgaacagctaccgacccgcctgtttatccgtaccggtgaagtcgaaggtaaagcggcggcagcgggtatgctgttgcaggttctgcctgccgaagagcgaaatgaagacgaattcgaccatttggcgcagctgacaaccactatcaaggcggaagaactgttcaccctgccagccaatgaagtgctgtatcgcctgtatcatcaggaagaagtgactatttatgatccgcagaatgtcagcttccgttgcacctgttcccgtgaacgatgcatggacgctttagtgactctgcctgttgaagaagtgcaggaaatgcttgagcaggatggtcaaattgatatgcactgcgaatattgtggcactcaccatatttttgacgctgtagatatcgccaatttgctcagcggaaacagcccgtctgacgatcaaatccattaattattctgttctttccgggcacatttactgtgcccggtgattcctgccgtttcacgcttgctataattcgtgtgctatctctcataacctagctaaaaataggtcatttattaaaatctttgatagcaatcgctgttaatcgaggctgaggatttacaatcggtggcataaaaataagacgaccctaggagttagacatgagtgttaaaggaatcaccccgcaagagctcgccgattatggcatccatagtgtaagcgagattgtttacaaccctagttatgagcttttatttcaggaagaaaccaagcctgatctgcaaggctatgagcgcgggactgtcaccaatttaggcgctgtcgccgttgataccggcatttttaccggccgctccccgaaagataaatacatcgttcgcgacgccatcactcaagataccgtgtggtgggccgatcagggcaaaggcaagaatgataataaaccgctgagtcaggaaacctggacccagttgaaagggctggttaccgaacaattatccggtaagcgtctgtttgtggttgatactttctgcggtgcgaacgctgatactcgtctgaaggttcgttttattaccgaggttgcgtggcaggcacacttcgtgaaaaacatgtttatccgccctactgatgaagaactggccaattttgagcctgattttatcgtgatgaacggcgctaaatgcacgaacccgaactggaaagagcagggtcttaactccgaaaactttgtggcattcaacctgaccgaacgcatgcagctgattggcggcacctggtacggcggcgagatgaagaaaggtatgttctcaatgatgaactacctgctaccgctgaaaggcattgcttccatgcactgttctgccaacgtgggcgagaaaggcgatgtagcgatcttcttcggcctgtctggcaccggcaaaaccaccctgtctaccgatcctaagcgtaaactcatcggcgatgatgaacacggctgggatgatgacggcgtgtttaactttgaaggcggctgctacgccaaaaccatcaaactttccgaggaagccgagccagatatttatcacgctattaagcgagacgctctgctggaaaacgtcatggtactggccgatggtaccgttgattttaacgatggatcgaaaacggaaaatacacgagtttcctatccgatttaccatatcgaaaacatcgttaagccagtatccaaagctggccacgcaaccaaagtcattttcctgaccgccgatgcgtttggtgttttaccaccggtatctcgtttaaccgctgatcaaacccagtatcacttcctgtctggctttaccgccaagctggccggtaccgaacgcggcgtaaccgaaccaacgccaaccttctctgcctgcttcggcgcggctttcctgtcgctgcatccaactcagtatgccgaagtactggtaaaacgcatgcaggcggcgggcgctcaggcctatctggttaacaccggctggaatggcacaggtaaacgtatttcgattaaagatacgcgtgggattattgatgccatcctgaatggcgatattgataaggctgagacattcaccttaccaatatttaatctgacggtaccgacggcgttgccgggcgtgaatccagagattctggacccgcgtcaaacctacggcagtcttgagcagtggcaggaaaaagcggaagatctggcaaaacgcttcgtcaccaacttcgataagtataccgatacccctgctggcgcagctttagtcagcgccgggccgaaaatctaatctgttttacttatgcaaaagggcacgatattcgtgcccttttttgatcttgctgattcttaatgatattagtcgctcacaccgtcaaccgtgtttgcccggtgccaccgatttcacgtctaagggcaatggcaggtaagcgcgaatgcacagcccgcccttctcactggtgccgatatccagcatacctgagtgagcatcaagaatacgctgtacgattgccagtcccagaccggtgccgctggtgctacgagcgctatcgccgcgaacgaatggctggaacagatgcttcaattcttccggtttgatacccggcccatcatcttccacttggaaccaggcgcgctgtaactcagtgccgctgcttacttttatccagccattaccataacgagctgcgttaaccaccatgttcgccaacgcacgtttaatcgataacggatgcacttcgaccttcacttcgccgtcgcataaatctgtttcaatttcccgctcatatccgctttctgccgcaatgacttcgcccaaaatggcgttcagatcgcaggtttccgtcggcatttcctccccggtgcgcaggtaatcaataaactgttcgatgatggcattacattcttcaatatctttattaatggattcagagagataaccatcctcttctgccatcatttccgtcgctaggcgaatacgggtcagcggtgtacgtaaatcatggctgacgcccgccatcagaagcgtgcggtcatctgccagcagctttactccggaggccatttggttaaatgcccgggttaccgagcgcacctcagatgcgccatattcccgcagcggcggcggaatatggcctttccccacctgtagcgccgcgtgctctagttccaccaagggccgattctgaatgcggataaacagccaggctccgccgaccgccagcagcataatcgctagcgtataacggaacagcggcgagaaatcaccctgatgaatttcagtcagaggaacccgcacccagatgtctggcgatagccaggttttcagccagacgaccggcgagtttttattaacctcaacccgcacatccgttggccctccaagctgctgggccatttgatcgctgagaaacttgtaatgctgagcccaacgcaggccactctcctccgccgcagcattggtatacaaagaaattcccaactcacggtagatttcacgccgaaaagcgggcgggacctccagtagcgtgccgtcttccagttgcagccggtcggtcatcagcatacgaacttcgtaagccagaaccttattgaactgctgcaaactaggcaaaatggcaaagtttagtaccactaaataagttgtgaccaaactgacgaacagcaaggtcacaatcaataacagggtacgggcaaacgagctacgcggagaaaagcgccatcgcctcatgctttactgccgtccggtacgaatacgtagcccaagccccaaacggtttggatataacgcggatgagcaggatcttcttccaccatacggcgtagacgggagatttgaacatcgatggaacgttccatggcgctgtactcacggccacgagccagattcatcaatttatcgcgggataacggctcacgcggatggctcaccaatgccttcagcacggcaaactcgccgctggtcaatggcataggttcatcttcgcgaaacatttcgcgggttcccaaattcagtttgaatttgccgaaggagataatcgcctcttcctgagaaggtgcacccggtagttcattggcctgacggcgcaacaccgcacgaatacgcgccaacagctcacgcgggttaaacggcttaggaatatagtcatctgcaccgatttccagaccaacaatacggtcaacttcttcgcctttcgcggtcaccataatgattggcattgggttgctctggctacgcaggcggcggcaaatagatagcccatcttcgcccggcaacatcaggtccagaaccatcaggtggaatgattcacgggttagcaagcggtccatctgttcagcattggctacgctgcggacttgaaaaccttgctcagtcaaatagcgttccaaaagcgcacgcaggcgcatgtcatcatcgacgaccagaatcttgtgattctcttgcattttagtactcccaaaggctgtattgcccgacctgaatattgttagaaaaactcacgctaacagacagctatttatggtatatattctagtcgaaattgttacaaagcttattgttctacctaataatcaacacttttcgtcaaatggccggtaccgaatctctaatatccagtaggttgcctcgccgttgggtgtctgaaccgtgatttcatcatctacctgtttaccaatcaaggctcgcgccaccggcgagtcaattgagatccattttttggccggatcgaattcatctgggccaaccaatcgaaaaaaccgctcttctcccagttcattttccaccctaacccaagcgccaaaataaacttttccttcctgacgcggatcgggatcgacgattttcaacacatccagacgtttggataaaaaacgcacccgacgatcgatttcccgcaggcgttttttcccataaatatattcggcattttcagaacggtcgcccattgcggctgcttctgaaactgcctgcgtcacccttggccgttcttctcgccatagatattttagttcgaggtccagagcctgccagccttcgcgggtgatgtaattacttttcgacattctcttatccactcaacacgggttgggtattcagtcatccaatataacgtaacttatcatcaatacgttgtcttccctcagattacgccaggttgtttactcgagccatgcctcaaactttacctatctcgacggtcataacttcacattaagacagactgtgttgactttttatacggcgagttataaagattaatacgcgcagaaaagcgctcaagtaacattgattaacatgatgttatatatggatttatttaaaatcacggaggattttaaaatggaaattattattcttgaaaccaagctaccagagcagaataaacctcgaccagcagccgaacaataacggtcaagacctccctaaaatattagggaggttagctcatactgacgtttataaaacaatttatgatctggagagcgaatcatggaaggtatcaacaagcctttattactgcccaatacggtagttttagacaagacggcctcgcgagcgggagtgacgctaactatcgcagacctcaatcaatgggataacttcaaacgcctgcttgaatgctgtgacggcacgcaaaccccacaacaaatcgctacacacctatcactcgacatcaccaccgttaatcatactttggcatctctggagtccgcaggcttcatctggtgtctgccagcgtatcaggcgattcctacgccactttttttgacggaattcaaccgctggctgcccatttgggtgcataagatgtatgaccaacagatatggcaagatttgtatgatggtaaagaatcgccgtcggtgcttatcggctgggcgcaggaaaatatgcattacactcgcagcgttatgtcgcatatgcctcgggctattcactatgccgatgaccaaatcgggcatggcatccaatttcgtcatctcagcgaagagtgggatcattaccggttatttatggccgcttgccacgatgtgggtatcgatcaggctcagttggatcaaagcccgcccctagccagtaccaccagcattacgcgttttatggccaatgtggctcaaatgggaacgctggtgtacaacgcctgcgaagccttgctggaagccaccacccaaaacgggcaatcggtgatcgatttctatcaaacggccggcgagcggctagaactccctcaggcattcaccgataagctgattcatcatttgatggcagatcagaagtttgaacatatcgatatcttcgaacacctactggaaggtcattcgacattaccggcacagaaagttactcagattttcactagctgtcatcggctcgccaattggtttgagatatggcatgacgatatttatcggcattatcactcattgccgctttctggcgctcagtgtgtttctacatcatccgaccagctttctggtacccactacgcaagttcaaccatataggaaagggttaactttatggataataccgcgacagccccagcactaccccttctgactcctaaggacttatcctttcccgctgacgcttggaacatgattcagcccgaagagatgaatgaacagtttatcgccgtgacgacttcgctgcgtggctggctgaaaggcggcgcaatgagcgaatactatggattaacgcctcactgctgcaaactcgccgttgaaatgtgccacctgctgtatggattagataaagcgctggtacgatgcgctgcggaaaccgaagataagcagcttcaggagctttttattctgcatgctttccacgctcatcgaatgaaaaaaacctgggataacatttgtcatgagctgacccaaaaacctctggctgaactggagccactgacctcaaccttaatgttgcagctcacactggagaatatcgccgctaaagatcctctggcttttgcctacgccatcgatctatttggatcacctggctacatcgaatctatcgaaccggtagtggcgttctttagcgagcttttggataacccggaaatcattgctcaccttgctacgtggaaatcagagtctattgataatgacacctctttcgccagtattcccctgaccaaagtctacggatatccccttgcgggcagctatggcaaagcctgttgcgattttatcggtccgcgcctgcaacgagatatcgataccagcctgattaatctggcggctctgggggatcaatttcatttgttttatcgcggtgtgcaggttttttacgtcgagaaggcattctccttccctcaattgcacatgaattggttacacagcgcctaatgccaccagcaccacaatcggtgaatactggagaaaatcatgctgttaaaagattccgttgtggttgaatatgttcgcgaacgagttttgcgcctcacctcccggctacaggtagttgagctggttcatgatgatatcaatgcattttttgtcgaaatgctgtcgagaaaccgagacccagaatccgctttgatagaaacagggtgcagcgccgatttcagccgagactttatggcattcctgcataaaaacgttctgctctatgccattccgattaatgctgattatattgctgccgcagatgccgctgacctgataaacaacgagctgaatcattgggcggatatactttacttcgacccattctggtcaacgatggaaaacccgacggcagcgacagatctgaatacgctttatgcttgggcaatagaaaactaccaccatactcacagtgtgatccgacatttaggagccgcgctatctcatactcagaatcaattggtcgcggacaaactcattacacatttgtctgaggaatgggatcacccttatctgttcaaacttagcgcaatacgttttcgccgtgctcatctgctacccgcactagaagaaacgctgttgccgttaccctgcactcagtctctttgcgcgctgttgcaattggccgccagacgaggttgtttcgcctacaaaagctgcgtagccgtactggaaaacaccgctcgacgagtcaatgaaacccgaacattttatcgaaatattgccgagcgaaacgcgttagattatagcgtggttgaacccttcgttatccacgcagaaacggatgaaaactatgatcatcttaattcgttaagtcagttttctgctcacagtccgcctttagccgtagcttgcgtggaagaagccttagggttggcttatcgttttgcagaggcactcaatctgtggcaacgccatatgatggatttgtacctcactcgctctttaggtgaaggccatcgaactcgacaaacagcctaggagtggctgggtatatgccgttgtggataaatactcggccgttactatcaatctctattatttttgccggatcgtcattggcctattacatgctgatgacgactctcgccacttatctctatgattatctgaacttatccgtagccaccgttggcaccatcatttttggctacgtttttacctcacgtctggcaaaggtcgctttggggccgtggttcgatcgattaactctacgcactagcctgatgctttctttaagcattgccgccgtcggttttttactggctgcatcagataagctgataggtatccttgctccttggtgcctctgtattgctggcgtgggcgtttcttccatcgtattgctaacccactctgctatcgcgcgccaaaaacagtcttcatccgacgcttctcacgctcctgccgattattcatttatctacgttcttatgcatggctcggcattaatcgcccctgccattggttttaatatattgctcaattatcctggtcagctgtattgggttattgctagtttctatctcgctctgctgctattttgccggttttttctctctgaacctcaccaccagtcagttgagaaagccaaaccgatcgttatagattttctgatcgccttcaaaaaacagcattactgccgattcttgctgatcaatagcctgctatggatgctttatgctcagcttttttccaccattccactctacgtgcgcgaagtattaggcgcagaaagccatatcacgcggttctacatggtcgaagccttgtctgtgatggtgctgcaatactgggtcagcgcccatattaacccgcggattcaggcttattttcccaaggtgacattagcggcgttttctctatccttcctgctgatttactacgctcataacatgtttttcatcctgctggcaggctgtatttttgcctttgcactaatggtatttatgccgtgctcaaacgcggctaatgcctcattcgccgagccagggcgtttcgctacctacttcgggctggtatcactgtctgccactctgggagattcgctcggcagtatattgggaatggtctgctttgatttgttactgcaaaacgagatgctaaaacactactttctctggctcgccggcattaccgcagcactggcaattctctgtcgcaatccgtataactgtcctttctgatttccctattcatctatcgaactgataccagacttatgaatgaaccactgagccgcattattgcaagcgaactacaggcccggccggagcaagtcatctccgctatccgcctgcttgatgaaggtaataccgtgccctttattgcacggtatcgtaaggaagttaccggcgggttggatgatacccagttgcgccagctggaaacccgtctgggttatctgcgtgaattggaagaccgccgccaaaccattctcaaatccattgaagatcaaggcaagctaactgagcaactcgccggtgccataaacggcactatgagtaaaaccgagctagaagacctttatctgccttataaaccgaagcgtcgcacgcgcggacagattgcgattgaagccggtctggaacctctggccgatagcttgtggaacaatccgcagcaagagcctgaatccgttgccgccgcctatatcgatgctgagaaaggcgttgccgataccaaagccgccttggatggcgcgcgttacatcctgatggagcgtttcgccgaagacgccacgctgctggctaaagtgcgtcagtatctatggaaaaatgcgcacctcgtctcaaaagtagttgaaggcaaagagcaggaaggggcaaagttccgcgattacttcgaacatcatgaacctatcgctcaggtaccttcgcaccgcgcattggctatgttccgtggccgcaatgaaggcgtgcttcaactgtctctgaatgccgatccgcagtttgaagaaccgccgcgtgaaagccagggcgaacagattattatcaatcatctggatctgcgcctgaataatgcgcctgccgatgcgtggcggaaagccgtcatcaactggacatggcgcatcaaagttttactgcatttggaaaccgaattgatgagcaccctgcgcgagcgggcggaagaagaagccatcaacgtgtttgcccgtaatatgcaggatttgctgatggcagcacctgccggcatgcgcgccaccatgggtctggatccaggattacgtaccggagtcaaagtcgccgtggttgatgccaccggtaaattagtggcttacgacacggtttaccctcataccggtcaggccaccaaagccgccgccactgtcgcggcgctatgcatcaagcatcaggttgaactggtggcaattggtaacggcaccgcgtctcgggaaacagagcgcttctttaccgaattgcagcagcaatatccggcggttaccgcacagaaagtgattgtcagtgaagccggagcctccgtgtattccgcatctgagctggcggcactggaattccccgatctggatgtctctatccgtggcgcggtgtcaattgcccgtcgcctgcaagatccgctggccgagctggttaagatcgatccaaaatctatcggggttggccagtatcagcatgacgttagccagagccaattggctaaaaaactggatgcggtggttgaagactgcgtaaacgccgttggcgtggatctcaatacagcgtcggtgccattactaacccgcgttgccggtctgacgcgcatgatggcgcaaaatatcgtgaactggcgtaatgaaaatggtcgtttccgtaatcgtgaacagctattgaaagtcagtcgtttggggccaaaagcctttgagcagtgcgccggtttcctgcgcatcaaccacggcgataacccgctggacgcctcgacggtgcatcccgaagcctatccggtagtcgaacgtattctggctgcgaccgagcaggcgttacaggatttaatgggcaatccaaccgtactgcggaacctgcaagccagagattttactaccgagcgtttcggtgtgccgacggtgacagatattcttaaagagttggaaaaaccgggtcgcgatccgcgtcctgagtttaaaaccgcaaccttcgcagacggcgttgaaaccatgaacgacctcaccgtgggaatgattctggaaggttcggtgactaacgtcaccaattttggagcctttgttgatatcggcgtccatcaggatggtttggtgcacatttcttcactggcagacaaatttgtcgatgacccacataaagtggtgaaagccggcgatatcgtcaaagtgaaagtaatggaagtagatttacagcgtaaacgtattgctttaacgatgcgtttagacgagcaaccgggagaaaccaatgcccgacgcggcagcgctgacaatagtgctaaacctcgtcagggaggacgcaatagtcaggattctcgcgatagagcgccagccaaaggacgcactgctagcgctaccggcgcaggcaacagcgccatgagcgacgcgctagcagcggccttaggcaaaaaacgctaatccaaccgcgccgctgactcttgtcagcggcgtttttccttcccagttcgcgccactctctcccttttctcactgctattctgtgatatgcctttcataatcttttggtctataaatatgaaattttatattcatagatgattagcagaagctaaacatctattttctgagtccatcatattttttctatttgtgttggacctctcaaaataaatgaggcgactgacgcaaccctaaggatttattaagaaacataataaataagattaactaaatataaatccagatattaattgattcaaatcatggtgaattgcagatagtgtaaattagaattattatccttaaggctggtcgtatatgtaaattgaaatacaattcattaaccattttaaccagccattctcgtttgcgaacgccacactttggtgctaaaaaaagaagatatcggcctagagcatattattcctaatgtcgtaacgaatatttaccattaggcttttgatcgctgttgaatacgataacgattctcactatcattattgtgtctattatcgcttagcgctaccgcccgcagttcaatggctagcgctaatagcccgattcctctggcagataatgtgatattcgcacctggcgttgagctggttagtccgccattttgttgccgataatgtcatcttttattatcacgagggttatatgcatcttcttcctcaacgcgcttataagattttgggattctctcctgaaatcagcccggcttatcgacaaaaattattgtcgctcggcatgttacccggttcatcatttaatgttgtgcgtctcgcaccattaggcgatcccattcagatagaaactcgccgcgttagcttggtcttgcgtaaaaaagatttagattttctgaatttggacctacagccttaatttttaggttcctttcattttattttctctgcggctcggttgggtatatcacctggtctagattaattttaatttactcatattacgttggatcatgaaagcactcacaatcggcttaattggcaaccccaatgcaggtaaaactacactgttcaaccaactgaccggagcacgtcagcgcgtaggtaactggtctggggtcacggtagaacggaaagaaggtcatttttccacggcgcagcatcaggtgactttggttgacctgcccggcacctattccctgacgaccatctctgaacaaacctcgctggatgaacaaattgcctgtcactacattctcagtggcgaagccgatctgttaatcaacgtaatagatgcgtcgaatctggaacgcaacctctatctgacattgcagctgctagagttgggcattccatgcattatcgcgctgaatatgctggatattgcccaaagtcaacgaatcaaaattgacgtggatgcgttgtctaagcgccttggttgcccggtcattccactagtttcgactcgtgcaacaggtattgccgaactgaaaaccagcatcgaccaatatcagccgaacaccgataacgctctggtgaactatccgccgctgttgctggaagaagttgaaaaactgacttcggccatgcccgatagtctgccaatgcagcaacggcgctggctggcgttacaaatgctggaaggtgatatctacagtctggcacgctccggcgtttcgcccgctttgctggcagagtcccgccaacggcttaaagatcaacaacatgaagatcccgaactggtgattgccgacgctcgttaccaaagcatcgcaacgctgtgtgatgcggttagcaacgcgcaacaggctgaacctaaccgtctgactcaaatgctagataaagtgattctgaatcgttggctcggcgtgccaattttcctgtttgttatgtatttgatgtttgtattggcgatcaatatcggcggggcgctacagccaatttttgatatcggctcatcggcgatatttattcagggtctacaatgggttggctataccctgcacttccccgaatggctgacgatatttttagctcaggggattggcggcgggatcaacactgttttaccgctggtaccgcaaatcggcatgatgtacctgtttctatccttcctcgaagattctggctatatggctcgggcggctttcgttatggaccgcctgatgcaggctctggggctgccgggtaaatccttcgtgccgctcatcgtcgggtttggctgtaacgtgccggcaattatgggcgcacgtaccttggacgctcagcgcgaacgcctgataaccgtcatgatggcgccctttatgtcctgtggtgcacgtctggctatttttgccgtcttcgccgccgctttcttcgggcaggacggtgccagcatcgtattctccctgtatttgctcggcatcgtggtcgccattcttaccggactgctactcaagtacaccattatgcgcggcgaagcctctcccttcgtgatggaactgccggtttaccacgttcctcacttaaaaagcctgctgctacagacctggcagcgcctgaaaggctttgtgctgcgcgccggtaaagtcatcgttatcgccagtatttttattggtggattgaacagctttaccttcggcgggaaagccgccgatagcattaatgactcagctttggcctcggtcagtaaagtactcacgccgttgctgacgccaatgggcgtacacgccgataactggcaggccaccgtgggcttggttaccggggctatggcgaaagaagtcgttgtggggacattaaacactctgtataccgccgagcaaattaagaacgaaccttttgatgcagaaggctttaatttgctggatgaactcggcggagcggtaaacgaaacctggcagggattaaaagataccttcagcctgagcgtactttccaacccgatcgaagccagcaagggtgacggtgaaatggaagctggttcaatgggcatgatgagcagcaaatttggctccagcgtggcggcttatagctacctgatctttgttttgctctacgttccctgcgtttccgttatgggcgcgatcgcccgtgaaaccagccgcggctggatgaccttctcaattctgtggggactaaacgtggcttactcactggcaacgctgttctatcaggccgcgacctttagcagccatccacagcaaagtttgggcattatcgcggcggtcatcgtctttaacattttgatattcttcggcctgcgccgtgctcgcagccgggtaaccttccgcctacagaatcgacagcccgcgagtggctgccaaaatggcggcggtcactgtcattaatcagggagaaatcaattatggccagtttgatgcaactgcgtgacacccttgccctgaacggctgcatggaagctagccagctaagtcagcagttggccgcaccgctacctttggtagaagctatgctagaacgactgattgctatgggaaaactggagcgtatcgagcaggataacaccggatgcctgagcggtagctgtaaaagctgcccggaaggccagaaatgcaataccgtggtgtatcagttaaaaacccactaaagaaaaaggtgatgtcagcaatggcatcaccttattgttattcaacgataattacttataaacatctgcggtagcgttaaattttttcttttcattttccgagatgatgacgtagtacttgccgcctttttcgtcggctttagccgacaaatcctgtttcacatccagtggagacatggcttcgccagaagaagaaatggtgccaattttttcgtagcctttgtctttcgcttcttgtcttgtaatttctttcgctgccaaagcgccaaaagacaacccaccaacaaccagagcaaccgctacatttttcaataatttcatggtaatacctcgcattaaagtgataggtgcgtgtacagaaaaattgagccaagtaataacgatatgagttagatttgatttgtattgatgcgcctacaggaaaggttcatccccagaggaagggttacagaaaaatcggcgcgatgaactgcccgttctgtagcacctgatctaacgcttctaattattgagtagattcagtatttagccaataaatgaccaatatatttcgatcccgtcgaggtaatggcagagatagcccttctcccgacggcgtgactccattaagaactctgagcagtctcagcggcaaaattaatgattaactctgcaaaatcatcagggtgagagataaatggagcatgagccgagcctttcatcactacagagcgactttgaggtaaagcatcatccagcaacgcggcaactttgcgcggcaccagaccatccagataaccataaatacgcagtaacgggacagaacaagcagccagctcctgacgtaaatccaccgtgcgcaaaatttccaggccaccggtcaatacttccacctcaggcatttgatgattcaataccaccgatttcagcaagcgtgcatcctgacgggcgctttccgtccccagcgtttgtaacgccaaaaaacgctcaacggtgcgttgaaaatcttccgttagctgctgttggaaacccgccagcacttctgggcgaatccccggccattcgtcatgggcggtaaaacagggggaagaagagaccgtaatcaggccgctcacgcgctccgggtgactcagggcaatctgactcgccaccaacccgcccattgaccaccccagccacagcgccttcgctggagcctgtttctgtacaatatcagccatctcatccagcgacatcgcaccataatctcggctgcgtccgtagcccggcaaatcgaccagatgaatacgaaaatgcggggcaagccgctcaatcatgcaacgccacacctcggcgttcagtccccatccgtgcagcagcacaagatcgcgatcgccttcgccgcaggtctgccaataaagctttgtcatcagttattatcctgttgccttcaacatcaaggaagatgcctatgctaacaatcaccgggctatgttggctatgccgacaaccgttacatctggcttttcacggaatttgctgtttctgtttacgtcatttacccatgccgccaccctgctgttttcgctgtggcttgccctcatcacagcccgaactaccctgcggtcgctgcctacagcaaccacggccatggcagcggatactgttcatcggggattatcaaccgccgttaagtacgctaataaaaatgctgaaatttaagggtttttcacaattagcgccggttttggctcgcttgatattcttacgctggcgaacgataaaatacgccgatagtgcggcaatcaagcctcagcggttgatcagcgtgccgttacatcaccagcgctgctggcagagaggttttaatcaaagcgatttattggcgcgacctttggctcgctggctaggctgcgattatcatcctgacagtctaaaacgcctgtctgccgcgccaccgcagcggcagctcaccgccagcgcgcgccggaagaatctaaggggaatatttcgccttaccgaagatttttgcggtcagcacgtcgtattactggatgatgttgtgacaacgggcagcacggttgccgagataggcgctatgctgcgggaacagaaggtaagctcattgcaggtctggtgtatttgccgcaccttgtagtcacggcgtcaatgggcgtattataaccgacaagagcagtcaactattgagctaatgccatgatcaaaataacagatgcagcacaatctcattttgccaaattgctggcaaatcaagaagaaggtacccaaatccgcgtatttgtgatcaacccaggtactccaacggcggaatgtggtgtgtcctattgcccgccggatgcggttgaggccacagataccgagctaaaattcgagcaattatccgcctatgtggatgaattgagcgtaccttatctgcaggatgctgaaatcgacttcgttaccgatcagttaggctcgcagttaaccctgaaagcgcctaatgccaaaatgcggaaagtggatgattctgcaccgctgatggaacgggtagagtacgttttgcagtcgcagattaacccacagctggctggccacggtggtcgcgttacgctgatggaaatcaccgatgacgggctggcaattcttcagttcggtggcggttgtaacggatgttcgatggtcgatgtgaccctgaaagaaggcatcgaaaaagagctgttacagaaattccctgaattgaaaggggtaagagacctgaccgagcatcagcgcggcgagcattcttattactgattccgttgtcttaaactggcaatggcaactctcactgccgttgcctaattgagaaacgctggaaaataaagggggtcgactcatcatcggctcccctttttaatttctacccttcaacgaatggcatcggataaacgctgatggttaacccgcagagacattcttgcgccgcttatccaaatccttcaaaagacggttaacccgctgatcggcaaacatctcctctaaagaatgggtcagcttacgacgccagttcggatactcatcgctggtgccgggaatattgaccggcgctgccatatctaaccagtcttccggctgtaatcccaacaacgcgctggcgctatctgccacatagcgttgtagacctctatttaacgttggactcatcgctagcagcgccgccttgcggccgactttcttcggtacgcagccataatggtgcaaaccttccagcaggccttgcttggctctttcccgatccgcatacaactgtttgagaatctgctggtctgggtacaaacccagcttattgcccaaagtcagatcgtcactttgccagtagccacgcagcgtcggtaaatcatgagtagtaatagtcgccatcgcctgcaccggataagactgaggcgcacggaaagtgttttcgctatctctttcaaagtagagcactttgtaagaataaacaccgctatcccgcagcttgctgactatttccaccggcaccgtccccaaatcctctccgatcaccatgcagcgatgacgctggctttccagcgccagtactgccaaaagatcgtcaaccggatacttcacataagcgccctgatctgccgtttcaccataaggaatccaccacaggcgcagcagtgccataacatggtcaatccgcaatgcgccacagctggtcatattggcacgcagcaaatcaataaatggctgataggctctggctaccatcacgtgaggatccatcggcggcaacccccagttttgacctaaagggccaagaatatctggcggcgcgccaaccgaggctttcaggcaatagagttcgcgatcgcaccaggtttccgcgccgccttcggctacgccaaccgccaaatcccgatacaaacctatcggcattttttgctgctggctgtggcggaaacactgggaaaactggctggctgccaaccactgcaaccacaggtagaaagtcacctcatcactatgctgctggcaaaactccgccacaccttcgccctgtccatcgcggtattgttctggccacaccggccagccccacatagcagaatcctgttggcttaaatgagcatgtaaagcatcgaaagcggcctgttgctgcaaacttttaccgccctgctccacaaactgccggaagtcctgcatttgcttatcattggctgctcgcgccaaaaacagcgggaaagccagacgtaaaccggccagtttcagctctgtcactttggcgtaatcgacccattcggcggtgcggatcgcagccagcgtgctttgggtttgcggcagatgccaccagcgctgagctgcttcactctgctgaaattcctccacgttgttcacgtcgatataaaccacattcagccagcgacgggacgaagggctatatgggctggcgctattgggattggccggatacaacgcatgaatcggatttaagccgataaatgcaccgccacgccctccgacctgttcaaccattcggtctaaatcgccgaaatcaccgataccccaattacgctccgaacgtaaagtgtagagctgtacgcaggcgccccagagcttttttccggtcagcaacgcgtctggctcatagcaacgtttcggtgccacaatgattgaacattgccattgctgcgtaccttgctccaacgctagatgatggtaaccaaggggtaacgatgccggcaacgtcagggttttttgggcgctaacgcgcccttgatgtgaaataccctcttctgtcaccagttgccagtgataatcaccttcaccgccgatagccagagtcatcgggcttacgtgagtaaagactttcaccaccggtaacggcgttttctcacccagcgaaggctgaacggaatccgggcttcgtcccatggctaccagcagtttctgcttggtttccatcggtatagcctgctgtttaccgtgggcattaatgtagctggcggctatccctgccagcgtagctgcctgatcgagcgatttacgatccatgcagtctccttaacgtttggcttgccagattcgctgctgataatcgcgaatcgaacgatcggaactaaacattcctacccgcgcggtattaagaatggtgcgacgagtccattcctctttatcacgatacagtgcatcaatctgctgttgagcctcacaatatgaagcaaaatcagccagtaccagatatggatcgcccccttcacgcaggctatgcagcatcatatcgaaagcgtgtttatcaccgttgctgaaggcaccgctggccagttcgtccaaaatactcttcagatgcgcatcggctttcaagactttcagtggctggtagcctttcgccaaaatagctttaacctgctcgacggtgttaccaaagataaagatattctcatcaccgacctgctcggcaatttcaacgttagcgccgtccagcgtgcccacagttaaagcgccgttcaatgccaacttcatgttaccggtgcccgatgcctctttaccggcagtggaaatctgttcagaaacatctgccgccggaatcatcagctcggctacggagactttataatcaggaataaatacaactttcagacgatctttgacgatcggatcgttattgatcttctcggccgcctgattaatggcgtaaatgatatttttcgccaggtaatagcccggtgccgcttttgcaccaaacaggaagacccgcggggcaatatccagattaggattatcgcgaatctggcgatacagcgacagaatatgcagtaaattcaaatgctgccgcttgtactcgtgcaggcgcttaatctgcacgtcaaagatggcatctggattcagcgtaattcccatagtgcgatggacgtattcggcaagttttaccttgttgtcgtacttaatctgctgatagcgcgcacggaattttttatcctcggcgtagggctccagcccttccagcacatccagattgttcgcccattccacttttaaagtttcgtcgatcaacgaagaaagggccggattacactgttttagccagcggcgcggcgtaataccgttggttacgttatggaatttttctggccacagctggaagtattccgggaacaaatctttaaccaccaaatccgaatgtagttgcgccacgccgttcaccgcgaaaccgctgaccacacacaggtttgccatacgtacctgtttatcatgatgtacggccagttttgcccacaccgctttatccccaggccactgtttatccacccgttttttaaactgagcgttgatttgcttgatgatggcaaagtggcgcggcaacaggctacgcaccaatttttcatcccaacattcaagggcttccggcatcagtgtatggttggtataagcgaaggttttactggtaatagcccaggcagcatcccagctcaactgatgttcatccaacagcactcgcagcatttcaggaatagcgatggttgggtgggtatcattcagctgaatcacttcatattcaggcagatcggccagtgtacgtccggcggcgtgatgtttgcgtaaaatatctgccacggaacaggcgcactggaagtattgctgcatcagacgcagacgctttccggccagatgattatcgttgggatacagaaccttagtcagtttttccgcatcaataccgttttgttcggctagcaggaatttaccgtcgttaaacttagtcagatcaaacggatgaacgtgggttgcctgccataaacgcaggggctgagtcaccccattgcggaagcccaataccggtaaatcccaggcttcaccgcgcagcgtaaaatctggacgccaaagctgacgaccatcggcctgtttttccagcttgccaccgaaactcacgtccaccgccagcgccgcattatgacggaaccacgggtagctctcgcgctcccagttgtctggcgcttcctgctgctttccttcgctaaatgactgacggaacagcccatattgatagttcagcccatagcccgtcgccggttgctccaccgttgccatcgaatcgaggaaacaggccgccaaacgtcccagaccaccgttacccaaagccggatcggtttcctgctccagcaagtcggccagattgacctgctgctctgccagcagtttctcaacggtttcataccagccgaggttgataagattatttgccgtcaagcgaccaatcaggaattccattgagatgtaattcacatggcgctgcgttttttgcactttagtcggcgccggttgagccgccaactgttcggccaatgccgcgctgaccgcctgccaccattggtgctgggtcatctgctgggccgaactgaggccaaagcgctgccactgacgggtcagtgctgccagaaaatcatccttctttagcatgggctgtgacatagggaagtctctatcctgtgagtggggtaattttacccttatcctgccgaggagaatcggcaagagcatcatcctggtaagggattagctggggatgagtcgcagggcgtagctaaaaatgtgatcaggtgcaacttacgaccataggaagtattaacgttattgcaataatttggccgttatcagaccttaacagggctgattaattacgaggcttaaaataattatccctatgaatccgccggtctgtcgttgccatttgagtctggaataatatgctgatcccttcaaaactgagccgcccggtacggctgcaaaataccgttgtgcgcgatcgcctattggccaaactttctgcggcagcgaactatcgcctgacgctggtgaattgcccggcggggtacggtaaaaccacgctggttgcccaatgggcagcggggcaatccaacctcggctggtattcactggatgaaagcgacaatcaacctgaacgtttcgctacctatctggtcgcggcggtgcaacaggccaccggtggacattgcagcaagagcgaagcgctcagccaaaaacatcaatatgccaatctttcggcgctgttcgcccaattatttgtggaactgtccgactgggacgggccgctgtatctggtgattgatgactatcatctgatcaccaacgacgccattcatgaagccatgcgctttttcctgcgccatcagcctgaaaacctcacgctgctgattttgtcccgcacgctgccgcctttgggcatcgccaatctgcgggtgcgcgatcagttactggaattgggtattcaacagttggcgtttaatcatcaggaagcgcagcaattctttgattgccgcttgccagtaccattagatcaaggagatagcagccgcctgtgtgacgaagtggaaggttgggctacggctttgcagcttatcgccctttcctctcgtcaacccaattcatcggcgcaaaaatccgctaaacgtctggctgggttaaatgccagccatctatccgattatctggtagatgaagtattggatcaggttgatgctaatgctcgtgcatttttgctacgttgttcggtgctgcgttcaatgaacgatgcgctgattgtgcgtctgaccggcgaagacaacggccagcaacggctggaagaattggaacgacaggggctattcattcaccgaatggatgacactggcgaatggttctgtttccatccgctgtttgccactttcctgcgtcaacgctgccagtgggaactggcgttggagctaccggatcttcaccacgccgcggctgaaggttggatggcgctgggttatcccgctgaagctattcaccatgcgctagcggctggcgatgtggggatgctgcgggatattctgctgcaacacgcctggtcacttttcaatcacagcgaattggcgctgctagaacaatgccttagcgcactaccttattctttgctgatacaaaatcctgaactggcgctgctacaagcctggctggcgcaaagtcagcatcgctatagtgaagttaacactctgctcggtcaggccgaaacggcgatgctggaacgtaaaattccgattgatgctgcgctcagcgccgaatttgacgcactgcgagcgcaggtagccattaacgcaggcaagccagatgaagcggaaaaactggcaaccgatgcgctgaaatacctgccgatggccagttactacagccgaattgtggcaacctccgtcacaggtgaagtgcatcactgcaaaggtgaactggctcgcgcgctgccaatgatgcagcaaactgagcaaatggcgcgccgccaccaggcctatcactacgcgttgtgggctctactgcaacagagtgaaattctgattgcccaaggcttcttgcaggcagcgtttgaaactcaggaaaaagccttcgagctgatacgcgaacagcaccttgagcaattgccgatgcatgaattcttactgcgtattcgcgcgcaggtgctgtggtcgtggtcgcgactggatgaagcagaggaagccgcacgtcagggcatcgctattctcgccaactatcagccacagcagcagttgcaatgtctggcaatgctctccaaatgctcgctggcgcggggcgatttagataacgcccatatgtatattcaacgctgcgaagccttgatccacggcactcaataccatcgcgactgggtaaccaatgcggataagcccagagtgatttactggcaaatgaccggtgataaaacggctgcggctaactggctgcgtcaggcggaaaaaccgggcatggccgataaccatttcctgcaaggccagtggcgtaatattgccagagtgcagattatgctcggttatttcgatgaggccgaagtggtactcgatgaactcaacgaaaatgcccgtcgcctgcgcctgaccagcgacctcaaccgcaacctgctgttaagtaatattctttactggcaaaccgaacggaaaggcgaagcgcaaaaagcgctgatagaatctctgacattggcaaaccgcaccggttttatcagccactttgtgatcgaaggggaagcaatggcacagcagttacgtcagcttatccaactgaacgcgctgccggaactggaacaacatcgtgctcaacgcatcctgaaagacatcaaccagcatcatcgccataaatttgctcattttgacgaacgctttgtcgataagttactgacccatccgcaggtgccagaattgattcgtaccagcccgctgactcagcgggaatggcaggttctcgggttgatttactccggttacagtaatgagcaaatagccagtgaactggacgtcgccgccaccacaatcaaaacccatattcgtaatttgtatcaaaaattgggcgtggcgcaccgtcaggaagcggtgcaacaagcgcagcgattgctgcaaatgatgggatacggcgtttaaccgaccgctgattttatctggcggacatttatccataccaaccaatgggtctttattggcataaaattgattacaatagcggcataaccacattaatcgccaataaaagggtgtcagcagtatggaacaatttgaagcaatcgacgttgagcaagcctacactcgctggaaagagggtcaggcggttctggtggatattcgcgatccgcagagctacgaagccggccatgcgccgggcgcatttcatttgaccaacggcagtttgcagacttttatgcaacaaaccgattttgaccagccggtgatggtgatgtgctatcacggcaacagcagccgcggtgcctctcaatacctgctggagcaaggtttcgatgctgtttacagcattaacggcggtttcgaagcctgggccagaaattacccgcaagatgtcgctacagacaaagcctgatttaccccttttcccaatgcaagaggccgccgctggcctctgccttgcgccatattgcatcacccacaagaatgatattaagccgacatattcacctgtctcggcggttttcgttgttgtgaactctggctttttttaaacaacagatgacatccctacagcgaaaagggagaatcagtttgctaacatgctaaattgctacgataaagctttagatattttataaatcataacgttagacggtaaattataaatatgattcgtgtgatagtaatttctaacctacgtctggcgcaggcctttgtggactatatggccacgcaaaaggtgattttggaactccgacaccagagccaggatgcagaaatctggctaaatgaggatgaaaaactgcctcaggttcagcatgagctggaacaatttttattagacccactcaacccgcgctatcaggcggcgagctggcaatcgggcaatcttcacaccgatatgccttatcagcgtgtttcgctgttgcagaatttacgtagtcaggctggcccactcaccctcggtctgatggcggtatgtattgcagtctatattctgatgcaaatcgttggcgataatgcggttatgagctggctggcctggccggtaaacagcagccagtatctggaaatctggcgttgggtcagccacgctgttctacacttctcgctgatgcatatcctgtttaacctactgtggtggtggtatttgggcggccaaatggaaaaacgcctcggcacgggaaaactagtggtattaacccttgtttctgccgtatttagcggctggggacaatccttattcagcggctcaaattttggtggcttgtccggcgtggtctacgccctgatgggttacgtttggctgaccggccaacgggcgccggagcggggagtctctctccctaacgggttgatggctttttctgttctgtggttaatcgccggatatttcgatattttaggtctgtcgatcgccaatgccgctcacgtttctggtctggtcattggattactgatggcattttgggatacgcgtaatagcacccgaaccacacaataacggtccgtaaaccgggcaaattaggggattatcgtgaagcaaacgcagcgacatgatgcgattattgaactggtgcgccttcagggttatgtcagcactgaagaactggtagaacactttgctgttagtccgcaaaccattcggcgtgacctgaatgatttggccgatcaaaataaaattcatcgccatcacggcggcgcagcgctgccttccagttcggtcaacgcggcctataacgaccgaaaagtcatgtggtctgaggaaaaagcgcgtattgctcaacgagttgccagccagattcccgatggcgcaacgctgtttatcgatatcggcaccacgccagaagccgtggctcacgcgctgctcaatcataaaaatcttcgcgtcgtgaccaataatctaaacgttgcgaccttactcaccgctaaagaagatttccgcctgattctggccggtggcgaagtgcgaacccgtgacggcggcattattggcgaggccacgctggatttcatctcccagttccgtctggattacggcattttaggcatcagcggtatcgatatggacggctctttgcttgagttcgattatcacgaagtacgcaccaaacgcgcgattatcgaaaactcccgctgcgtgatgttggtcaccgaccactccaaatttggccgtaatgcgatggtaaatctgggaaatatgaatttaatcgactacctgtttaccgatcagcagccccctgccagcgtgatgaaaatcattgagcagcatgatgtgcagctagaactgtgttaattcccgccctctggctcacccaataagacttgaactacaatcaggggcttcggcccctattgacgatatttacccacactttcgccgctattccctgccatttctctcaagttagacacccaagacttcacctataatctatctataagacggtaaaaacgcttcccgcaaaggaagtttgcttcgctgcactgattacatctttaaaatgaacccgcaacaaaactgttaccttcatcacgcataaatgtttttctttggttaactcttggcttgtttgttggtttttgattacaatcgtgagcgaaaacgaacattaaagagctgtttcgaacatctggaggaaggttacatggaaaccaaagacttgatcgtgatcggtggcggcattaacggtgccggtatcgctgcggatgctgccggacgtggcctgtcagtactgctgctggaagcgcaagacttggcctgtgctacgtcttccgccagttccaaacttatccacggtggcctgcgctacctggaacactacgaattccgtctggttagcgaagctttggccgagcgcgaagtgctgctaaaaatggcaccgcatatcgccttcccaatgcgttttcgcctgccacatcagccccatctgcgccctgcctggatgattcgcgccggtctgttcctgtacgatcacttgggtaaacgtaccactttgcctgccagtaaaggcctgcgttttggcgcagattccgtcctaaaaccggagctggtgcgcggtttcgaatattccgactgttgggtggatgatgcgcgtctagtggtgcttaacgctcaggaagtggttgaacgcggtggcgaagtgcgtactcgcactaaagtgacccgcgcctggcgtgaaaacggcctgtggatggtagaagcaaccgacgtcaatactggtaaaaccttcacctggcgtgccaaaggtctggttaacgccacaggtccttgggtaaaacagttctttgacgatggtctaaaactgaaatctccttacggtatccgcctgattaaaggcagccatatcgttgttccacgcgtacataaccagccgcaggcttacattctgcaaaatgaagatcaccgtatcgttttcgtcattccgtggctggatgattactccattattggtaccaccgacgtggaataccacggcgatcctaaagatgtgaagatcgacgatcaggaaatcgattatttactgaaagtgtataacgaccactttaagaaacagcttggccgtgacgatattgtctggacatactctggcgtgcgtccgctatgtgacgatgaatccgactcaccgcaggccgtgacccgcgattacacgctggacgtggctgatgaacagggcaaagccccgttgctatcggtattcggcggcaaactgaccacttatcgtaaattggcagaacatgcactggaaaaactgactcaatactacccgaaagtcggcccagcctggactaagaacggttcgctgccgggtggcgatatcggcggcgatcgcgacagttataccgttaaactgcgccatcactataactggctgccggaagctctggcgcgccgttatacccgcacttacggtagccatagcgagattattctggccaatgccaccagccttaaagatttgggcgaagatttcggccatggcctgtacgaagccgagttgcgctatttggttgagaaagagtgggttgtcgagttagacgatgccatctggcgccgtaccaaactgggtatgtggctggatgaggcgcagaaacaacgcattgccgaatggttggcggcagttcatgccgagaaaatgaatacgctgtcactggtttcctgattcgacagacgcgccgcaatgaaaaaaaccgcctgcttcctgatagaagcggcggttttttcttagagttttatcggtttaatgtgccaaatctcatcggcatattcctgaatcgtcctgtcagatgagaaataccccatattggcgatatttaataccgcacgacgagtccattcatccggttgtagatatagctcatccaccgcgtcctgcgtatccacatagctacgatagtcagccaataactgataataatcgcccagattaaccaacgaatcgaacaggctggtatagcgattgggttcttctgggctgaaaattccggtggcgatctgcgtcaacacttgatgaagctcagggtcttcatcatagtatttccgcgggttataaccactgcggcgtaattcttcaacctgctcagcggtgttaccaaatatgaaaatattatcctcaccgacgtgctctcggatttccacgttagcgccatcgagggtgccaatcgtcagcgcaccgttcagggcaaatttcatattactggtgccagaggcttcggttccggctagtgaaatctgctcggatagatccgccgccgggataatcatctgcgccagactaacgccatagttcggaataaacacgactttcaacaggttgttcaccctaggatcgttgtttattactttagcgacatcattgatcaagcgaataatctgtttcgcattgtaataggccgatgccgctttaccggcgaagatcaccactcttggtacccatttcgcctctggatcctgcaaaatacggttatagcgcgtgatcacatgtaaaacattcagcaactgccgtttgtattcatgcattcgctttatctgcacatcaaacagtgccgcgggattgagcacaatattcaggttttgtgcgacataaattgccagccgctttttattttccagcttggctttctgtatcgcctgtaaaaagctcggataatcaatattgggtttgatatcgctcagttggctaagatcggtacgccagttatggccaatgctgtcatccagcaccgccgccagcgggcgattcgccagcccaagccagcgacgcggcgtcactccgttggttttattgcagaagcgagtcgggaaaatacgagcaaaatcagcaaatagagactgaaccatcaactcagaatgcaacgccgatacgccgttcactttatggcaggcaatcacggccagccacgccatgcgcacccgccgcccgttcccttcatcgataatcgacactctggacggtaattcattatcgtccgggaaggcttcctgcacttgtttgaggaagtgatcgttaatatcgaaaataatttgtagatggcgcggcaaaatcttaccaatcatatcgatcggccaggtttccagtgcctcagccatcaaagtatggttggtgtaagagaaaatggtttccaccattccccaagctttgatccaggtaaatttatgctcatcaatcagcaaacgcattaattcagggatagacaacaccgggtgcgtatcattcagatgaatggcaatcttctctgccagattgtcgaaggtatgatgcagcgcccagtggcgggctaaaatatcctgaaccgtggctgaaaccaggaaatactcctgccgtagacgaagttctcgtccggaataggtcgaatcatcgggatacagcactcgcgatacgttttccgaatggttcttatcctctaccgccgcaaagtaatccccctgattgaatttacccaaattgatttcattactggcgcgcgccgaccataaacgcaatgtattagtcgcatcggtatcaaaaccaggaatgatttgatcataggcgcaggccagaatttcctcagtttccagccagcgggtttttgtcccttcctgctggatacgaccaccaaagcgcactttataacgtgtgttatgacgcgggaattcccaggcattaccgtattccagccagttatctggggattccgcctgctgcccattgacgattttctggctaaacatgccgtattcgtagcgaatgccgtagccccgccccggcatggctaaagtcgccagtgaatccagaaaacacgctgccagacgccctaaaccgccgttccctagccctgggtcactctcttcggccagcaactcattgaaatcgatacccatttcatccagcgcggctttgatatcatcataaatacccatagataacagcgcgttggacaatgttcgacctaacagaaactccatcgacaggtaataaacctgccggacatcttgagataattgtgcccgattggagcgcagccagcgttccaccatacggtcacgcactgcgaacagcgtggcgttcagccaatcgtgctcagtggcgatggaaggatctttaccgacaataaacatcagcttataggcaatagagtgtttcagtgcttccacactgactacgggtgaggtgtagctaaagggtgtcgtcattagcggtatttccctaatttgtggttacaacaagtgttgataaagcgaccggtagtctgctgccgctacctgccaaccaaaatcaagctccatcccatgacgctgtacgtgacgccaatgttttggacgaacccagagcacaaaggcacggcgaattgcccgctccagttccgctgcttcacattcatcaaacacaaaccccgatgcgctaccatcggccagattttctaaagcacaatccactactgtatccgccagcccgccggtatggcgcactaacggcagagttccgtatttcaaaccgtataactgcgtcaagccgcaaggctcaaaacggctgggaaccaagatcacatcggcaccggcaataatccggtgcgagaacgcctcatgataaccaatctgaacgccaacctgatctggataatccgccgatgcggccagaaaagcctcttgtagcagcgcatcccccgcgcctagcaccactaactggccacccagcctgagtaactcgggtaacgcctgtagcaccagatccaaacctttttgcgccgttaagcggctaaccaccgcgaaaatcggttttttatcagtaacctgtagccccatggctttctgcaaatgggctttgttgaccgccttgcctcgcaaatcttcagaatcatagcgctctcccaacagagcatctgtggtcggatcccaaatttcttcatccacaccgttgagaatgccgctcaatcgcccttcccgcgctcgctgttgcagcaatccctccattccgtaaccaaaggcaggctgggtaatctctttagcgtaggtcgggctaacggttgtcacatgatcggcgtaaaacaaaccggctttaaggaatgaaatctgaccgtagaattccaaaccgtagatattaaagaaggacggcggaagctgtagctcagccatatggtgagcggaaaatagcccttggtaggccagattatgtaccgtaaagaccgaacgagccggacgtccccgcgccgccagataggcgcaggccaaacccgcgtgccaatcgtgagcatgcacaatattggggcgccagtagctatccagcccgcaggccagttcgcaagccatccaaccaagtagcgcgaagcgccgatgattatcaccgtaagcattcaaccattggtcgtggtaagggctgccggggcgatcgtataaacctggcacatcaatcaggtagattccaacgccattgtaagtgccataactcaattccacccgcccggcgaaggtatcaatttctttgactaatactctatggggaatgccgtttttcaggtcgggaaacgccggtaaaatcacccgaacgtcggtgccatcggcaatttgagccgcaggtaaagcgccgacaacgtccgctaatcctccggtctttagtaagggaaacatctcagaacagacatgtaaaacccgcatcattactcctggtatctcatcagctaccaataggcttacagacaacatacggcttcggccagaatatcaggctcacgttttcacgccagcctgaagctaaattacaactgagccagcatttcccttgtgacgagtacaattccgccttccgaacggtagaaacgtgcactatcctcttccgcattctcaccgatcaccatcccttctggaatttggcaggcgcggtcgataatgcagtgccgtaaacgacacgatcggcccacattaacgtctggcagcagcaccgctgaatctatcgtacagaacgagttaatccgcacccgagggaatagcactgaatgcaccaccacggaaccggaaacaatacagccgccagaaaccagtgaattcatggtcataccgtggctaccggagcgatcctgcacaaattttgccggcggcagtggttccatatgcgtgcgaatcggccaggagcggtcgtacatatccagttccggcgttaccgaggctaaatccaggttagcgcgccaataggcatccagtgtcccgacatcacgccaataaggcggtaagtcgccgttggaagtcacgcaagacagagtaaacggatgcgcccaggcttctccccgctcggtaattttaggtatcaggtctttaccaaaatcatggctggaccccagagtattcatatcctcgagcaataatttatacagataatccgcattaaaaatatagatccccatgctggccagcgccatatcgggatttccaggcattgatgccggaacttccggcttttctgtaaacgacttgatctgatagtccagagacacttccataacaccgaatcccgaagcttcgcttagcggcaccggaatacaagccacgctacatttcgcccctttttcaacgtggtcaatcagcatgcgcgagtaatccattttataaatgtgatcacccgccagaatgacgatatattccgcattgtatctgtgaataatatccagattctgatacaccgcatccgcggttcccttgtaccattcttcagtgctcaaacgttgctgagccggcagcaaatcgacaaactcgttcatttcttcgttgaagaacgaccaaccgcgctggatatgctgaaccaaagaatgggactgatattgggtaatgacgccgatccggcgaatgcccgagtttagacagttagacagggcaaaatcgataatgcgaaacttaccgccaaaatgtaccgccggtttggcacgagtggccgtcaggtctttcaagcgcgaaccgcgccctcccgctaaaatcagagctaccgatttaagcggcagtagtctggctaacatcaacggatctctattttcgaatttaaccatagcggattccttagattttttgttcaaacacacgcactgaaaatgcggcgctatgccccgtaagtaattctgtctgttgcggctcagcgacatcgcgcgaagcaaaaggaggtacaggcagccatttcccggcgggtaaagtcaattcacaggcttggtcggaggcattaatcaccactagccaacgttgagataaacaaatctggagctttctttgaaagccctgctcccaggctaaggcactcatttcctgcccctgcatgttcaaccattgcacactgccatcgccttcctgccaccagcggtcttgcgtaagcgccggtattttttgccgcaggcggataagttcggcagtaaagttcgccagatcgctatctgcctgtgtccaatccaaccaggtcatagcgttgttctgacagtaggcgttattgttaccttgctgactgtggccatgctcatcaccggccagcagcattggcgtacctagtgaaagcagtaacgtgctgagtaacgcccgctggcaggccttgcgcctatgccagaccgcctcatccgccgttaatccttcattcccgaagttattgctgaaattactatccgtaccgtcgcggttgtcttcaccattagccagattatgtttttggttgaaacacaggagatccagtaaggtaaaaccatcgtgtgaagtgatcatgttgatactggcggaaggcaaacgctcccgctgagcatagatatcggcagagccggaaaaacgttgggcaaattgccccaaagagaattgattgtgtagccagaaacgtcgcattccatcgcgatattggtcattccactcgctaaaaccgcgagggaaatggcctacctgataaccgccccagccgatatcccaaggttctgcgatcattttgcaatgagccaaccgcggctccgcttgtaacgcttggaaaaagggtgcgtcctgatgaaattcaggcgtgcgccccaaaatcgcgccgagatcgaagcgaaaaccgtcgacgtggcaactctcaacccaataacacaggcagtcgattacccaacgaaccacttccggatgatccagcttgagcgcgttaccgcagccggtttgattctcatactctccctgcgcgttcagccagtaatagctggcattatcgatccctcgcagcgatagcgttggcccttcagcgtccagctcggcgctgtggttaaacaccacgtccagaatgacctcaatgcctgcacgatgcagggcttttaccgcatcccgcagttcccgcagcggtgagaaaccttcccgcccggatgcataatccggctctaccgcatagggcgctaatacgttgtagccccaatagttggttagccccagtttctgcactcgaggttcatccacatgatgctgaatcggcagcaattccagcgcggtaataccgagctttttcaggtaatcaatcatcacaggatgagccaaagcaccatagctgccacgtagcgtctcgggaatgtcggggtgtagctgagttaatccgcgaacgtgagcttcataaattatcgtattgccccaaggcaccgccggcgggcaatcgccctgccagtcatattcctcatgtaccaccacggattttggcatcgcatcggcgctatcctgctgatcggcatgatccattccgccgaacaggcgcggatcgtcatcaacgcgtccttccactgcacgagcacagggatcgagtaggagtttctgcgcattaaaacgatgtcccgattggggatcaaacggcccgctaacgcgaaatccgtaacgctgaccaggctgaccgccgggtaaatatccatgccagatatcgccgctgcgagcgggcaacggcaagcgaacctcccgccccgcttcgtcgaacaggcacagttctacgtcataggcatgagccgaaaacagggtgaaattaatccctgaaccgtcaaaatacgcgccaagaggagtaggagaaccagtctgtaacgtggtcatgctatccctccctcagcagataaagagtggcgagcggcggtagagtcagcgataaagattgatcctggttatggctgccaatctgttgagtatcaatcgcgccctgattacccaaattactgccacaataataggttgaatcggtattcaacacttcgcgataccgtccggcgcggggcacgcctactcgatagttatagcgcggcaccggggtgaagttactgatggcgatcaattcattacctgccgcatcacggcgcaggaaagcaaaaactgagttttcatggtcatctaccaccagccattcaaaaccttccggctgataatccagttcgtacagcggcgcattatcttgataacaatggttaagatctcgcaccaaacgttgaacgccgctatgccagccgttttcgtcatcgagcaagtgccagtccagactggtgtcaaaattccactcccgcccttgagcaaattcgcatcccataaacagcagttttttgccgggatgcgcccacataaagccgtaataagcgcggaggttagcgaatttctgccaggcatcgccgggcatccgatccagaatcgagcgtttgccatgtaccacttcatcatgggaaagcggcaacacgaaattctcggtataggcatacaacatgccaaaagtcattagattatggtggtatttgcggtgaaccggatcgagctgcatgtaattgagcgtgtcgtgcatccagcccagattccatttgtaattgaaacctaaaccattggcttctggcggcaaggttacgccgggatagtcggtggattcttccgctaacgtcaccgcgccgggtcgttctacgccgagggtatggttggtgtaacgcaggaaagaaatagcttccagattgtctctgccgccatattggttaggcacccactcgccttcggcccggctgtaatcccgataaatcatcgaagcgaccgcatctattcgcagaccatcgataccaaaacgttccagccagtaaaaagcgtttcctgccagatagttgcgaacttcatttcgtccgtagttataaatcagggtattccaatcctgatgataaccttcacgcggatcggcatattcgtacagcgcggtaccgtcaaactgcgccagaccgtattcatcactagggaaatgacctggaacccaatccagaatcacgtttagccccgcctgatgggctttctcaatgaattgcctgaaatcctgtggcgttccaaagcggcgggtcggtgcatacatgcccaacggttggtagccccaactgccatcaaacggatgctcactcatcgggagtaattcgatatgggtaaaacccatatatttgacgtaatcaaccagttgttcagctagttcgccgtagctcagccagaaattgttttcggtatgtcgccgccaggaccccagatgaacttcataaatagaaactggcgcattgagcgcattggctttttgtcgaatgggagagttctcaacaatatcaggcagtgggctaatcagagaggccgtttctggtcgcatttgcgcttcaaaagcgtaagggtctgcttttaggcgaatatttccattactgtctattatctcgtatttatatagctgtccggcctgtacacccggtaaaaaaacttcccaaataccgttttcttttctcagcctcattggttggcggcggccatcccagaagttaaatgcaccaacaaccgacactcgcttggcattaggtgcccaaaccgcaaaactgacgccttccaccccgtctaaagacatcaaatgagcacctaaacgttcataggggcgcaaatgcgtaccttccgccaataaccagctatctatatcctgcaataaggggccaaatcgataaggatcttcgataatttcagtactatccgcccaaataacagctaactggtagcgaaatggatttttacgacgaggaatgacagcggcaaagaagcccctggaatcgatacaatcgagccgagtgactttcttattggttttgcagtcaactacccatacttctttagcatcaggcagcagagcacgcacttgcagcatatcggcaactttgtgcataccaagaatggaaaaaggatctgaataattaccacaaataacctgattaatcacattttgctcgggaagtgctgacattttatctttcctatgactaatagcatgatttacaagaaaaaatcattaagataaataaaaattcaacttatctatcatgcaatccatttaccgtataaatcatgacgacgatcaaaatgacgatttttttagcttaaaatctcaaaaaaccaccctgataaatttcaatcccggctcagagttacccttgtgacaatgcgcgccccaagctataagcatagtcaaaggtgagtaaaaaatggttaagcaatcaaggaaatccctttccagcactaaaaggaataatccggttaatttatttcgggttagcggcagttattcactcaaattggcactttggtagcagatctcacggtctgtgtttttttatatttagttgttcgagttaaaattttctcattcatgccttcgttataatggcctcggaaataacggaggcaatacagcatgggcgttagccagaccgaactgattttttcattactgcaacaaatgtgcgtatatctggttatcgcatacctgctcagtaaaacaccgcttttcattccattgatgcaagtcaccatccgcttgccgcacaagctggtgtgctatctcaccttttccatgttttgcatcatggggacttatttcggcctgcatattgatgattccattgccaatacacgtgctattggtgcggttttaggcggcgtactggggggaccatccgtcggttttctggtcggcttaaccggcggattacaccgttattctctgggaggaatgaccgcgaccgcctgtatgctctccacggtcgcggaaggtctgataggcggcttccttcataactacctgattcgtaggaatcggctggatttactgttccaacctttagtgattgctggcatgacgttagtggcggaagtgctgcaaatgctgattattctggcggtttcgcgccccttttccgaagcggtggaactggttgaaaatattgcattgccgatgatgatcaccaataccattggcgcagctatgttcatgcgcatcctactggatcggcgcgctattttcgaaaaatacaccacggcattttcggctaaagccttacagatcgccgccagagcagaaggactattgcgacacggatttgatcagcaaaacagtatgcgagtagcgcggattctgtatgaggaattgggcgttggggcggtggcgattaccgatagagaaaagcttctggcctttatcggcaccggctcagatcatcatattgtcggttccgcgattacttcacaccacactcatcgagccatcggaatggatcaggtggtttatgccgacggcaacgcggtgccctatacctgttcgatttcacccacttgcaaactaggctctacgctggttattcctctacgaggagaagaacatcgcgtcatcggcagcattaaactgtatgaaccgaaaaccaagctgttttccagtatcaaccgcacgctaggggaaggcattgctcaccttctatcggcgcagattatggcgggtagatttgagcaacaaaaacaattattagcccagtcggagatcaaactcctccacgctcaggtaaatccgcattttctattcaacgccctcaataccttatcggttgtgattcgtcgcgatcccaatcacgctcgcaaactggtgctttcactttccaccttcttccgtaaaaacctgaagcgcagccacgatgtcgttactctgagcgatgaaattgagcatgtgaatgcttacctggaaattgaaaaagcgcgctttgccgatcgattgaacgtcaatatcgccctgccagaaaatattctggctgcccgactacccgcgttctctttgcagccggtggtagaaaatgccattaaacacggaatttctcagatgttcagcaatggaaatattaccctacgcggcaatatgcaggatggaatcctgacgttggaagtagaagataatgcgggattgtatgaatccaagcccgacggggacggattgggcatgaatctggtcgacagacgtatcaaggtgcgttatggccagcagtacggcgtgaccgtgacctgtgagacggacatatatacccgtatctcgattaaattaccgttccataccgcagcagaaaattgaattaatccgctgatatttagcgataaaaaaaggttgctagcatcgcaacctttttgattttttagcgacttcagaactacagttttagagcggcagcgattacgccagaatccgcagcatacggcgtaacggttctgccgcgccccaaagcaattggtcgccaacggtgaaggcggataaatactccggccccatgttcagcttgcgcaaacggcctaccggcgtattcaacgtgccggtcacggcggcgggagtcagctcacgcatcgtcaactcgcgatcgttcgggatgactcgtacccaatcattgtgggttgccagcaacgcctcgatttcaatgagcggaaggtcttttttcagtttcagagtaaatgcctgactatgacagcgcagagcgccaacacgcacacataacccatccaccggaataacgctgctggtattcagaattttgttcgtttccgcctggcctttccactcttcccggctctggccgttatccaacgctttatcaatccacggaatcaggctgccagccaatggcacaccaaagttatcggttggcaacgtgccgctgcgtgtcgccgccgtcactttacgctcaatatccaaaatggcagaagcagggttctgtagctctttggctacgccagcgtgcagcatacccatttgggttagcaactcacgcatatgacgagcaccgccgccggatgcagcctgataagtggcaacagacgcccattcgaccaggtcattggcaaacaggccacccagtgacatcaacatcaggctaacggtgcagttaccgccaacaaacgttttgattccctgatttaacccttgctgaatcacatcattgtttaccggatccaaaataataatggcatcgtctttcatgcgcagagaagaagctgcatcgatccaaaaaccctgccagccgctggcacgcagctgaggataaattccgttggtataatccccgccctgacaactaatgataatatccagagcacgcagcgcgtcgatatcataagcgtcttgcaaggtgccctgctgaccggtaaaagtaggcgcagcctgaccgtgctgtgaagtagagaaaaagaccgggcggatgccgtcaaaatcgcgttcttcgatcatgcgctgcatgagcacagagccgaccataccgcgccagccgataaaaccaacgtttttcatgtttactgtcctgccttggaagaggtgacaaccgattaagggatgcctgtcttgtggcgctgcgccgccgaaaatggcatggcagactgactctaagagagacctgataccaccttacaaaatatgtaaaaagtggcaagttaatttaatcgatgccggaggaattcacagtaatcctcctaatacccgagcgtctctggtttgatataccggaaacttttagtccgttgaggtcacaatgacagaaatgattgcggcaaccgtgttgctgtttttgataatggatcctttaggcaatttgcccattttcatgtcggtgctcaagcatctggaaccgaagcggcgacgggtagtgctgattcgcgagctgcttatctcacttatcttgatgttgatttttttgttcgcgggcgagaatattttggcgtttttgaacttacgcactgaaaccgtttcgatttccggcggaatcattctgtttttaatcgccatcaaaatgattttcccttccaatgaaggtcactcaaccgacttacctgctggagaagaaccattcctggttccactggcaattccgctaatggctggcccatcaatattggccacactgatgcttctttctcatcaatatccaaatcgcatgagccatttggtgttagcgctgctgatcgcctggggtttatcctcagttatcttgttgatgtctggtgtatttttacgtctgttgggggataaaggcgtcagcgcattggaacgactgatgggattgattctggtgatgttatctacccagatgtttttagatggcgtcagagcctatctcacggcctaattcatcggcgacgacgataaaaacacacaaggggccacgattggccccgataaccaagcggtgccgaagctagactttatggctcagcgccgccacgcagcgacgtactacttcatcaatatcggcatcgatatccacgcaaatcacgtctttctcgtctgccagaggctcttccaaggtttcaaactggcttttcagcagatcggtgggcataaaatgacccgaacgagcttttaatcgctccataatcacgtcaaagctgcctttcagatagagaaaaaccatatctttattgccttcccgcaggcaatcgcggtaacgacgttttagagcagaacagacaataataccggtttcgtttttatggttcaggctgtaggccgcgtcgctcaaacgttccagccacggcattctgtcgtcatcatttaacggatgcccgctggccattttttgaatattggcgcgcggatgcagatcatcaccgtcaataaatttggcgtgaattgcatgagcaacggcttcacccaccgtcgtttttccgctgcccgatacgcccatcacaatgatgctatgtcctgccataagtttgatctctatctcagaatgggaattttaccctgtttgacggttccgtattttaacatgttaccggtatcatgataccggtaacaaatggagatgtgacttttatcacaaagggaagaacaccgggttttgtactcaatcgcgcaatcacgccagcctgtttaaagactgagcgtaataataaaaggaaggttcttatcccgttacctgtcctggataagcaccctaccccactaatttcgcgttgcagcaaaatgagcaatatcaatacctatagctttcagattacagccaaacggcaattggcctccatccgaggagcttagtccgctaagtgaatcgagatagccaaaacagccggtgtcgctgcaacgggaaagagacaaggtacaaagtcagaaaacgccgctgcggcgagaaaaaagcagggtaaataaatcataactaaaagcgataaataggttggagaaatgctatgccattagtcattgtcgcggttggcgttgccatgctgctgttactgatgatccgtttcaagctgaacgggtttatctcgctgattctggtcgctctggcggtcggaattatgcagggtatgccggttgataaagtggtcggctcgattaaagccggggttggcggcacgcttggcagcctggcgctaattatgggctttggtgccatgctgggtaaactgctggcggactgcggcggtgctcaacgcatcgctaccacgctgattgataaattcggcagacaacatattcaatgggccgtggtactgacaggttttaccgtcggttttgccctgttttatgaggtcggtttcgtactattactaccgctggtattcagcattgcggcgtctgcacgcattcctttgctgtatatcggtgtgccaatggctgctgcgctttcggtcactcacggctttctgcctcctcaccccggcccaacggcgattgcgaccattttccatgccgatatgggtaaaaccttgctgtacggcaccttactggctattccaacggtcatattagctggtccggtttatgctcgattcctgaagggcattgataagccggttcctgaaggtttatacaacccaaaaacctttaccgatgaagaaatgccgagctttggcgtcagtgttgcgaccgctctggtgccggttattctgatggcgctgcgtgccgtagccgagatgattttgccaaaagggcatccggttctggcttatgccgaattcttcggcgatccggttattgcgacccttatcgctgtattaatcgctattttcacctttggcctgaaccgcgggcgctccatggaatcggtaatggataccgtaaccgactccattaaaatcatcgctatgatgctgttggttattggcggtggcggcgcattcaagcaggtattggtggacagcggcgttgaacaatatattgccggtatgatgagcggcagcggtgtatcaccaattctgatggcttggtctatcgcggcactgttgcgtatcgcgctgggttctgccacggtcgcggccattaccgccggaggtattgttgctccattgattgccaccaccggtgccagcccagagctgatggttattgccgtcggttccggcagcgtgattttctctcacgttaacgatccgggcttctggctgtttaaggaatatttcaatctgaccattatggaaaccattaaatcctggtcagtgctggaaaccatcatttcagtatgtggattagtcggctgcctgttattggctatggtgatttaattcgctgagtttgaaggttagttcacacaaaaaaggcctgctgtcgaaagatagcgggccttttctttaacgccattattcagatactgccaccgggcagaatagtgaagccgacatcgaccattttgggtgacaccgattcaccacgcagcctggcaatcagacgttctgcacctatttgccccattttttcgcggggagtcagtacgctagccaaacgcggcaccatcgactgcccaatatcatggccgtggaaaccagcaatcgccatatcctgcgggatagataatccctggcgttgacattcgaaaaacgcgccgatggccaagtcatcattggtacagaaaatactgtcgatctgcggataactaacctgcgcttcacgcaacagctcgccaccggcagaataggaagatgagcggctggtcataatactgaccggctctaaacccgattctctcatcgcctgctcgtaaccctgctgcttaatcaccgttcgctcatcctgacgcgcaccgaaatagactacgtgacggtggccctgagtgataatttgctgagtcatctggcgagcggcttcaaaattgttaaatccaaccgccagatcgatgcagggggaaacacaatccatcaattcgatcaccggaataccggacacctgaatcatttttaaggtacggggagtgtgattccgttcggagagaatcagaccgtcgatgttataagacagcagcgaggtcaggcgttgttcttccagctctttctgataaccatagtgagccagcatggtttgatagccgtgaacgtctgtgacgctctcaataccgcgtaaaacctcggcaaatacctgattagttaatgaaggcaataatacgccaatcgcccggctggtggcgtttgacagaatatccggcgcacggttggggatatagcccaactcatccaatgccaccgcaattttcccctgtagcacggcggaaacctgctgcggattacgcaaatagcggctaaccgtcattttcgtgacgccaaccatatcagctacatcttgaagcactggcctttttttcttcattatcaatgaactggcgcaagagagacgggcggggattttaacaaaaaaaagggtataacgcgatgcgcataccctttttagccgataaatgaaggttaaaccggtggcagatcaaataacaatatctcactgtcttcatcggcatgaatcgacaatgcggtttcatcccaaatggcgaaagcatcgctggtgcctgcgtgatgaccattgatagcaaccttgccacgtactacctgaatccagattctgcgctccgcctgaatctgataaacagattgttcatcttttttcagcgcccagcgcgatagcgtcatatcttggaacactttcagagaaccgtcgcgagcatccggagacagcaccaactggcgcccctgtgggttatcaaagcgcttttgttcatagcgcggtggtaaaccattagtttcaggaataatccagatttgatataggtgcaacggctggtcactacgaccattgtattcagagtggcgcacacccgtgccggcactcataatctggaactcacccgcatggatttgttctttattgcccatgctgtcctgatgttctacggttcccgatagtacataggttagaatttccatatccttatggggatgagtaccgaaaccctgcccagcgtcgatcacgtcttcgttaatcacccgcagcgccgagaaccccataaagttagcgtcataataatcagcgaatgagaaggtatgccagctatctaaccagccgtgattagcgtgaccgcgttcttctgctttgcgtagataaatcatattcaattctcctcaacgttttctttagtctagatgtcgcaggaaaatatgaaagcgtaaaaaactcatccctctgttcaaataattcgacaaagaaaaaagcataaaaacaaagcgtgtgcagaggcagaaaatgcggaaatcaaacaagccgttgcgactattccaccgagaaaaggcaaaaaaaaagccagcacccggctggctaagtaaacactggaagcaatgtgagcaatgtcgtgccttcgtcatgtgaacacctaaactttgatggtctcacttgaaagcatgacaatgataatcattatcactctcaactgtaaagcattatttttaatcaatgcgaatataattgactgcgatgaataaaccgatactttgttaggttattcaaacactaatcaataggaaaagccctatgtctcatgcgcaaatacgtccggtagaaccttctgattatttggctctgcaacagctatatgcacatccgaaggtgtatcgcgacaccttacagcttccgctacctgctccggatttgtgggcgaagaagctggggactcccgcgccaggtatctattattacgttgcctgtatcgacggacaaatcgcaggccagctcagccttgagacaatacaaagaccgcgccgcaaccacgttgccaccttcggcattgcagtagacgcgggtttcttgggccagggagttggcagtgcgttgatgaaaaccatgattgatttatgtgataactggttgaacatcaatagaattgaactaacggtattcgttgataatgatactgccgtagcgctgtacaagaaatttggttttgaaatcgagggaaccagtaaacgctatgccttacgcgacggtaaatatatcgacgcttatcatatggccagggtaatagacccaaaataaatcacctgaacacgcaattagcggaactttcctctcacttatttacacatcagcccgaagatcgtgaccgatcgcgtcacgatctgtttccatctctccttgaaataaaacacgacagcgatcacactccgctgccataaatcaacgaaacggcgtagaatactgctcgcttttaatggacagatttccgacagaatagtcgctcacagcgtgaattgatgatgaggttgttgtgtttgagagttatggagtactcaatctttggacgtatgtcctaggtgccattttcattattatcgtgccggggccaaacaccctgttcgttctgaaaacaggcattacccgcggtgttaaagaaggctataaggctgcattagcggtgtttattggcgatgcagtactgatattttgcgcctatgtgggaattgcctccctgatccgctcttcgcctttcctgtttacgctggtcaaaatgctcggtgccatttacctcttgtatttggggcttaaaatcctctacagcaccttggtgaaaaaaggtcagagcgaagcaaccgagatcgtggaacacactttccgcaaagcgctgaccctgagcctgaccaatcccaaggccattttgttctacgtttcgttttttgtgcagtttatcgatcaaagttatgcccacaccggcctgtccttcgtgatactggcggtgattctggaaatgataagctttgtctatatgtcgctgctcatttttgctggcgcagcactaacccacttcctgagtgagaaaaaacgtctcgccaaactgggtaattcgatggttgggctgcttttcctcggttttgccaccaaactggctaccgcagcctaaaacctaccgatataagccgatatcaatagaaatggcgccatcatcaggcgccatttttgttgtgcacagaaaacctccagctaggctggaggttccgtaaagctttcagctttgagccagttataaaaaccccttttgatttgttaaaacagtttgcggtctggcaactgcaaatgttcaacaagaaatcaaaagkgggtccctatgagggatgaaaagagcttagcgcacacgcgatggaactgtaaatatcacatggtttttgcaccgaagtaccgaagaaaggtgttctacggggaaaagcgcaaagcgataggcagtatcttaagaaagctgtgcgaatggaaaaacgtgaatattctggaagcagaatgctgtgtggatcacatccatatgcttctggaaatcccgcccaaaatgagtgtgtcgggttttatgggatacctgaaaggaaagagcagcctgatgctttatgagcagtttggcgatttgaagttcaaataccgtaacagggagtgctggtgtcgagggtattacgttgatacggttgggaaaaatacagccaggatacaagaatacataaagcaccagttggaagaggataaaatgggtgagcaactctcgatcccctatccgggcagcccgtttacgggccgtaagtaatccataaatgcaaatgtcagatcgcgatgcgcctgttagggcgcggctggcaacagagccttataggcgcatatgaaaaacctccggctatgccggaggatatttatttatatccatcggttctttagatgcaaagctagcgggctatttgctcgccagcgcctgtgcgcacgcccaggcggagctccatgcccactggaagttgtagccgcccagccaaccggtcacgtccaccacttctccgataaaatacagccccggaactttatgagcttccatagttttggaagacagctcctgcgtatctacaccgccgatggtaacttctgcggtgcggtagccctcagtaccattaggttgcacccgccattcttgcaacgtcaccgccagcgctgcctgctgaggcacattaagctgttttaaggtgacgtcaggtatctgacctaacagctgtaagcactccaccaaacgtttcggaagcagctgcgccagcgtgttcttcaaactttgattcggatgtgcctggcgctcgctattcaggaaagcgtccaaatcggtatcaggaagtaagttaatgctcacatattcgccaggctgccaatagctggaaagctgaagaatggccgggccagacaggccgcgatgagtaaacaaaatactttcgcggaaactgacgccgttttctgccgtcactaccgcgggcactgaaacgccggagagagtttgtagatgctccagcagaggtttatgcagtgtaaaaggcaccaacgcggcgcgggtcggcaaaaccttcaggccaaactgttcggcgattttataaccgaaaggcgtcgcgcccagccccggcatcgacaagccaccggaagcgataaccagtgaggaagtgctcactttatgttcatttatctgtaattcaaagcccgcgtcgattttctcgaccgccagaatctcgctgcgtaaacggatagttacctgacctgattcgcactctttcagcaacagttccaccacttgctgcgcggaatcatcacaaaacagctgaccgagggttttctcgtgataggcaataccgtgtcgattgatcagatcaatgaaatcccattgggtataacgcgccagcgcagatttacagaaatgagggttttgcgaaagataagccgcaggttccgcgtagagattggtgaaattacagcgcccgccgccagacatcaggattttacgcccagcctttttgccgttatccaccagcaatacccgacgccctaattgccctgcctgagccgcgcaaaatagccctgcggcacccgcgcccaccaccactacgtcaaactgttccactttcggcctctctctgtaaaatcattatcgccgcaaaattgctcatatttcgcaattttaccgcagtgttcaccacaaataaccgaataatcagcggcggaggattgtaaggccctaacagaaagatcgctatagtaagaaaatgttagattcagtaaatcagagtaacttgctgatatctcatggttatgttcatggttatgatgcatctatccacatttatatcaaagaaaggtcattttttccttttccccaacccctattgtcaccgataatgcgccgcgttcatgtccacaaactggcgtaacgcttatgctacatcttttcgctggcctggatttccataccggccttatgttagttcttgctcttttgttcgtgctgttttacgaagccatcaatggttttcatgatacagccaatgcggttgctaccgtaatttacacccgtgccatgcgttcacagatcgctgtggttatggcgggggtattcaactttcttggcgtgatgctgggcggtttgagcgtggcctatgccatcgttcatttattgcctacagatctcctgttgaatgtcagttcggctcatgggttggcgatggtcttctccatgttgttggcggcgatcatctggaatctgggaacctggtacttcggtattcctgcttccagctcacatacgctgattggtgccatcattgggatcggcctaaccaacgcggtgatgactagtacatccgtggtggatgcactgaatattccaaagatgatacaaatcttcctatcactgattttgtcgccgttagtgggcttaattattgctgggttgatggtattcctgctgcgtcgttactggagcggaaccaaaaagcgagctcgtattcacttaacgcctgctgagcgtgaaaagaaagatggtaaacgcaaaccaccgttctggacccgtacagctctgattttatcggctatcggcgtgagtttctctcacggcgctaacgatggtcagaaaggtatcggcctgattatgttggtgttgattggcgtcgcaccggctggttttgtcgttaatatgagcgcgactggttacgatattgcccgtacgcgggatgccgtaactcatttgcagcaatattatcagcaacacagtgaagccttgccgcacgctatcgcgttgaagcctttggtccccgcaccagagactctgcctgatacaccggcgcagttccattgtgacagctctcgcgccatgattgctatcgaccatgcgcaggcactgttggctaacctgcaaagctacgacgacctgactgtggagcaacgcagccatatgcgtcgcttgctgatgtgtgtcgccgaaacggctggcacggttgccaagttaccggaaaccagttctgcggacaggcgtttcctgaacaacctgcgtaaagatttgctggaaaccgtggaatacgcacctacctggattatcgttgcagtagctttggcgctctctctgggcactatggttggctggaaacgtgttgcagtgaccattggtgagaagattggtaagaaaggaatgacctacgcgcaaggggtttcggcccagatgaccgcggcggtatctatcggtattgccagctacaccggtatgccggtttccacgacccaggttctctcctcagccgttgccggtactatgctggtcgatggcggtggcgtacagggtaaaaccattaagagcatcatgctggcctggattcttactctgccagtatcgattcttctttccggttcactgtactggatagcgttgaaattcatctaagcctggctggatgactccacgttaccgcaaataaaaaggcggcctcatcatcggggtcgccttttttagttggctatcatcaaaaatcatctcagtaccatagagccagcgccatcaagctgacaacgaccaagccgcacagggcgctggtgagaatgaactggccgcgcagtctttcacagcgacggataaattccggatcgtggtggtcggtataacgctgggcgtagatataacgcactagccgaatttgtttactgggttgtccgtgagaggtgaaaaaaccgcccccatccacatattgatacagcaatggatcacagccgcgtaacaccactaatagcgcacgtagagacgaataataacgcgccatattcaccacgcacaccacacataaagcccagaaaagcgcgacggtactgatcatgattccccctccagcgatatttcgcgttaacgacacctttgattcgccgttacgccatcgcccgctctagccattacaaccatccccgaggcgcagaaacatgcctctccatcaccttttttatatatgagccgacgctaccgctaaaattttgcctaacccatttaccagtgtaggaaatgaaatcagaaatagcctgataatctctgatttatccggtcacattttgtacgcaactgatgcttttaggcgcaaatttcagtgaaaaaccgccagaaacagctcaaaatagttagtctctcttaacttaaatgcagagataaaagctagcgaaccggcgtttttgatcaatactcactgctttatcagtactataattatggatatagcgagccaaatgattaccggataaacggccaaatatttgacaacagcggtctgagcaataggattaagccgtctattggtgtaaaacagtgacttaagctttaacgcgtacaattaaaagcctgcgttgtgatcggtgaaacacttcgcttatggatcatagtgatagtatctagacatagccttagcgcccgttcagttacctgaatgattgcttacccattaattagcattatggaaggagtttacttatggcttacaaacacattctgattgcggtagacctgtctccggaaagcaaggtgttggttgaaaaagcggtctccatggccaaaccatacaatgccaaagtgtccctgatccatgtggatgttaactattcggatctctataccggcctgatcgacgttaatttgggcgacatgcagaaacgtatttctgaagaaacccacagcgcgctgaccgagctatcccaaaatgcaggttatccaatcactgaaaccttaagcggtagcggcgatttgggccaggttctggttgatgcgattaaaaaatacgatatcgatctggtgctgtgtggtcaccatcaagacttctggagcaagctgatgtcctctgctcgccagctgattaataccgttcacgtcgacatgttgatcgttccgttgaaagacgaagatgacgaataataaaccacgattgaattaatatacatttagaacgcctgcctatgcaggcgtttatcattatataaccccaaatccctttgtcccccgccctaataacttcgttatatttcagtgagaaaacccttgcggtatgattataaagcggtgatatagtcaagaaagacacaacatcgccctctcactatttcgccatactcattccaataagaaatcgttagcggggatctaccatgtacaaaggaatcttttttgatgaatgatttagcctctctggagtcgtttctagaatctttacaacaacgtgatgcccaccagccggaattccttcaggcagtccgtgaagttttcacctccctatggccattcctggaacagaatccgcgctatcgcgagcaaagtctgctggagcgtctggttgaacctgagcgagtcatccagttccgcgtatcgtgggttgatgataaaggtcaggtacaggttaaccgcgcgtggcgggtgcagttcagctccgcaatcggcccttacaaaggcgggatgcgcttccatccatcggtaaatctttcgattctgaaattcctcggctttgagcaaactttcaaaaatgctctcaccaccctgccaatgggtggcggaaaaggtggatccgacttcaaccctaaagggaaaagtcaggctgaagtcatgcgtttctgtcaggcattgatgaccgaactctatcgtcatcttggcccagacaccgacgtgccagccggtgatatcggcgttggcagtcgtgaagttggatttatgaccggcatgatgaaaaagctgtccaacaacaccgcctgcgtgttcactggcaaaggtttgtccttcggtggcagtctgattcgcccagaagctaccggctacggtctggtttatttcaccgacgctatgttgaaacgccacggtttgggatttgaaggcatgaaagtggcagtatccggcgcgggtaacgtagcgcagtataccattgagaaagcaatggaattgggcgcgcgcgtgattaccgtttccgattctggcggcactctggtagatgaggctggctttacgccagaaaaactggcccacctgtctgaaatcaaaaaccaacgttatggccgcgtggaagattatgcccgcgagcgcaatctgacctatctgacgggtgagcagccttggaacgtgccggtagacattgctctgccttgcgcgacccaaaatgaattggatctgcccgccgctcgtcagcttatcgccaacggtgtgaaagccgtcgcggaaggcgcaaatatgccaacgaccattcaggccactgatgcttttatcgaagctggcgtgctgtttgctccgggtaaggctgccaatgccggcggcgttgccacatcgggtttggaaatggcgcagaatgcggcacgcctgagctggaaatcagagaaagtggatgtgcgtttacgtcacatcatgctggatattcaccagtcttgcgtggaattcggcggagaaggaaaacaaacgcaatacgttcacggtgccaatatcgcaggctttgtaaaagttgctgatgccatgctggcgcagggcgtgctttaagttaaggtcggataataaaccccattctggcaaaaacgtcgcgctggaatggggagtttagacaacgaatttaaacgatatcgcctaaggcaaatacagatcgaaacggtgacttttggtcgtaatggcggcctgagcgggcacgccagccaaaggttcagcgtagtcaggccgcttcactaccactcttttggtggccagtgcgcgcgccggggccaatagtccatcagcatcctcatccgcgccaaccaatgactgaaacactcgcatttctttcttcaccaacgcgcttttctgccggtgcggatacataggatcgagataaaccacttctggacgcggatcgagatcggccaacgccgttaggctggaagcatgtagcaaagtcatacgttcctgtaaccagccaccgatttcagggtcctgataaccccgccgcaggccatcatccagcaacgcagccactaccgggttccgctccagcatccggactttgcagcccaaagccgccaaaacaaaagcgtcgcgccccaaaccggcggttgcgtctaccacgttcggcaaatagccttttttgataccaacggctttcgccaccgcctcaccgcgtccgccgccaaaccgacggcgatgagccagagtaccggaaacaaaatcgacaaaaatcccgccgagcttgggttcatccaacttacgcagctccaattgcgttggcgttaacaccagcgccatcgtcgcctgctcgtcagaaatcaaaccccagcgttcagccagaatagataaggtgccgggatcggcaccttcttcacaaattaaacgaatactcacgcgggataatgcccttcagacttaacctttaataccgtagtggcgcagcatagcatccaactgcggctcgcgcccacggaagcgtttgaacaacgtcatcggctcctcggaaccaccgcgagataaaatattgtcgaggaaagattggcctgtttcagcgttgaaaatgccctcttcttcaaagcgggagaacgcatccgccgacagcacttctgcccacagatagctgtaataacccgccgcataaccaccggcaaaaatatggctgaaagcatgggggaatctaccccagcttggtgatggcactacggcaacctgttttttcacttcctgtaaggttgacagaatctgcgcacctttagccggatcaaactcgaaatgcatacggaaatcaaacagtccgaattcgagctgacgcaggataaacagcgccgcctgatagtttttcgccgccagcatcttatccagcatttcctgcggcaaaggctcattggtttgataatggccagagataaacgccagcgcctccggctcccagcaccagttttccataaactggctcggcagctcgaccgcatcccaaggcacaccgctgatgccggaaacaccggcggtatcaatttgggtcagcatatggtgcaaaccgtggccaaattcatggaatagagtcgtgacttcattatgggtaaacagcgccggtttatcaccgaccgggccattgaagttgcacaccagataagccaccggcttttgcagctcaccgttagccagacgcagactgtcgatacaatcgcccatccacgcaccgccgcgtttgtgttcgcgagcgtacaagtccagatagaagctgccgcgcagctcgccctgagcatcaaacagatcgaagaaacgcacgtccggatgccaagtatccacgccctgccgctctttggcggtaataccgtaaatgcgtttcacgacctcgaacagaccttctaccacgcgctgttccgggaagtaagggcgcagttgctcgtcgctgatggagaataaatgctgcttttgtttctcggaatagtaaggaatatcccacgccgctaactcgctgacaccgaagtgttgtttggcaaaagcacgcagctgcgccagctcttcttctgcctgcggacgtgcacgtttggccagatcattcagaaaattcagcacttgctgcggatcttcagccattttggtcgccaatgaatgatcggcatagctttcaaatcctaataactgagccagttcgtggcgcagagtcaggatttcagccatgatttcgctgttatcccacttaccggcgttcggcccctgatcggaggcccgggttgcaaacgcgcgatacatttcttcacgcagcgcggcgttatccgcgtaagtcatcaccggtagatagctcggcatatccaacgtcagcagccagccatccagctctttggcttcggccatcgcgcgagcggcggccagagcgctttccggcaaaccagccagctctttctcatcggtaatcagtttggtccagcccatagtggcatccagcacattattgctgtaggtcgaacccagctcggacagacgcgccacgatttcaccgtaacgtttttgctgctcttccggtaaaccaataccggacaattggaaatcacgcagcgcattctccaccgctttacgctgcggcggagtcaattcggcaaagccggggccttctttcaggctgacgtaagcctgatataaacctttatgctggccaacccaggtgccgtattcagacagcagcggcaggctttgctcgtaggcggtacgcaattccgggctattttttaccgcgtttaaatggccgacaggcgaccagatgcgagagagacggccgtcggattctgccagcggctggcacagattatcccaggtgaaaggacccggttgggccacaacccgctccaccgattgacgacattcatctaaagcggattgcaccgcaggcacgatatcttcagggcggatagccgaaaacggcggcaaggagaacggagtcaacagcggatttgtcatagggtgtcctgattatagttgtcgtcctgacgatggtttactcatgattttcctaccgtcagatgataaatgcggatgaacatttaacatgaggtctgtcgcgcggaaaatcaatggctggcggcatcattccctttgatagataatgctgcctaagccgcaggagaagccgcaaatgttaagttatcgccacagttttcacgcaggcaaccatgccgacgtactcaaacatactgttcaaagcctgattattgagtctttgaaagaaaaagaaaaacctttcctttatctagatacccacgctggcgcaggccgctatcagctaagcggcgagcacgccgaacgcactggggaatatctggaaggtatcgccaagatttggcaacgagatgatttaccggctgatttagctccgtatatgagcgccattaatgcgttgaatcacaacgggcagctacgttattaccctggttcgccgctgatcgcccgtcatttgctacgtgaatatgacaaaatcagcctaaccgagctgcatcccagcgattacccgatgctgcgtaaagaatttgccaaagacgaacgctccaaagtgcaacgcgccgacggttaccagcaactgaaagctcagttaccaccgcagtctcgccgcggttttgtgctaatggatccgccttatgaaatgaaaaccgattatcaggacgtggtaaaagggattcaggaaggttataagcgctttgcgaccggtacttacgctttatggtatccagtggtattacgccagcaaatcaaacgattactgcgtgaactagaagccacgggcatccgccggattctgcaaatcgaactggcggtacgtccggatagcgatcaacacggtatgactgcctctggcatgatcgtaattaacccgccgtggaagttggaaaaacaaatgaccgatctgctaccttggctgcataaagcgctagtaccctctggtcacggccacaccttggtaaaatgggtcgtgccggaataatcgccgcgcctttcgctcctggccgggctgcaatccatgctgtccggctcattcaatattacccaatttttatcaccgtttagcgcaaaagctttctcgtcttccaacacctatcacagccatcgatgcaatctttgcgacaaagtgggatctggcgttaaactctttgcttctataaaactacactcatggaaatgatcctgatgaccaaacattacgattatctggcaattggcggcggcagtggcgggatcgcatcgatcaaccgggcagccatgtacggtaaaaaatgtgcgctgatcgaagctaaacagctcggcggcacctgcgtcaacgtcggctgtgtgccgaagaaagtgatgtggcacgcggcacaaatcgctgaagcgattcgcatgtacggtccggactacggttttgataccacggtgaaccacttcgactggaaaaccctgatcgccaaccgtaccgcctacattgatcgtattcatcagtcctacgagcgtggtttaggcaataacaaagttgatgtgattcagggcttcgctcgctttgtcgatgctcataccgttgaagtcaacggcgagaaaatcactgcggatcacatcctgatcgccaccggcggccgccctagccatccaaatattcccggcgcggaatacggtattgattccgacggtttctttgagctagatgaaatgccaaaacgcgttgccgtcattggcgcgggttatatcgccgtcgaaatcgctggcgtactgaacggtttaggcaccgaaactcacctgtttgtacgtaaacacgcgccgctgcgcagttttgatccgctgatcgtagaaaccctagtggaagtcatgaacaccgaagggccaaaactgcataccgaatccgtgccaaaagccgtgattaaaaatgctgacggcagtctgacgctgcaactggaaaacggcacagaagtgaccgttgatcatctgatctgggcgattggccgcgaacctgcgaccgacaacctgaatctggccgcctgcggtgtgaaaaccaatgaaaaaggctatatcgtcgtcgataaattccaaaataccaatgtaaaaggtatttatgccgttggtgacaacacgggtgcagtggagctgactccggttgccgtggctgcaggtcgccgcctgtccgagcgcctgtttaacaacaagccagacgagcatcttgattacagcaatattccaaccgtggtattcagccacccacccattggcactattggtttaaccgagccgcaggcgcgtgagcagtttggcgacgatcaggtaaaagtctataaatcctcctttactgcgatgtacagcgccgtcactcaacatcgccagccgtgccgtatgaagctggtatgcgtgggcgcagaagagaaaatcgtcggtatccacggaatcggctttggtatggatgaaattctgcaaggtttcgccgtagcagtaaaaatgggcgcaaccaagaaagacttcgacaataccgtagctatccacccgaccgccgcggaagaatttgtcactatgagataatcatttagagatgagtttctctatttgagtcatggaacgtgaagccgaaatgcaaatttcggctttttattgcttggaattcagcttcgctacaccccctctcctttcttacagctatatcaccaccgtctacatcagcgcgattaaatagaaatgacgataaaaagaggcgttgagtcacttaccgagtctgaacatcattgcatcttacaacatagaaacttgatgaatacataaagacagtgtatgaaaattgacatatagaaattatcaatacttactgaggtaacgatcaaattgcatttattcttacttgttcgaattacccagctctaagacattaatcaggtcgaaaaaataaattaaataccctttaaaatcaaaatattaaaaagaaaacctccggcgggaaataaatttaaataaactatcacttatataaaataatatgaaaataaaaagaataattaagtcaatgatgattcacaaaattaatttattgatgcgatactttgtttctaaatttatcccaagcgaatcagataactttattttctttttattactcacgatcaatgagaataaatagctcatgaaaatatattcgccgttcgcagcggttaatttagaacctaaaaattcatttaaaatataaaaaggaacatctatgaaacctatcaattgtaaaaatagtctgattacgattctgactctatgcaccctgtttggtttttctcattcctccgcgtttgccgcctcggttaatgatgacgcgtcggttatgccaagcctggtaaataaaaagattatggcgggtttctggcataactgggacagccaagaaagccgtggctatcaaggtggttatccgaagaatctaaaaataaacgaaacacccgcggcctttaacgttgtcattgcctcctttatgaaaggcagcggtattccaacctttaagccgtacaacgcaacggacgcagagtttcgcgcacaaatcggtgagttaaataaacaaggccgcgctgtgctcatttcattgggcggcgctgacgcacacgtggcattgaataacggtcaggaacaggctttcgcagacgagattattcgtttggttgaaacctatggttttgacgggctggatatcgatctggaacaaacggctattaatgcagctaataacaccaccgttattcccgccgcgttgaaaattgttcgggcgcattacgaacaacaaggtaaacactttatcatcagtatggcaccagaattcccatatctgacaaccggcagaccttacactacctatatcaacgccttggacggtgtgtatgactttattgcccctcagctctacaatcaaggcggtgacggcgtatgggtcgaagaagtaaacctgtggctggcgcaaaacaatgacgccaaaaaatatgaattcctgtattacatggccgattctattgttaatggcaaacgcggcttcattaaaatcccagccaataaattagtattgggtttaccaagtaacgttgacgctgcggcatcaggtacggtaaaaaatccgcaggacgtttatcgtgcctttgctgatttagagaaagcgggaacgccaatcaaaggcctgatgacctggtcggtcaactgggatcagggtaaagataaagcggggaatgcttataatcaggcattcgccaaggcttataccgacttgattcacggtaaataatattaaccgctcataaagttgttccgtaaggcagttttattagcctggggtacaaatctacagccggagctcttgttccggctgctttatatcaatactcttcaatttgcctgaatgcgaaaataaatatcagccaattaatcgattgaagccggcttccaaatcagcaattaaatcatcgacattttccagtccaatatgaacacgtaccaaagtaccctcaaaacctacgccgcctaccggacgaatttcgtccagttcttccggctgattagccagaatcagagactcaaatccaccccatgaatacgccatgctgaagtgctcaaaattatccagataatgagccacttgctcatcactgagacgagatttcaacacaaaggagaacaatccgcagctcccagtgaaatcacgtaaataaaactcatggccggggcaggatggcagtgctggatggttaacctgcgccacttccggacgagcggccagccatttggcgatctggatactgctggtttcatgctgctttagccgtacgcctaaggtgcgcagaccgcggctagcaacgtaagcggtgtctgcatcgaccatttgccccagcaaatacgaatgttcccgcaattgatcccaacagcgcgcattagataccgccgtgcccaacatagcgtctgagtgaccgacgatatatttggttccggcctgaatagaaatatcgatgccaaactccagtgcgttaaatagcactccggcagcccaggtattatcgatcataatcacgatattgggattaactgcccgaatagcctgcaccatgccgggaacatcctgaacttccattgtgatggagctgggagattctaaaaataccactttggtatttggctgaataagctcggcaattccagcgccgatcagtggagaataataagtggtggtgacacccagtttggacagcactttattgcaaaaatcctgcgttggctcataagcagcaccggtcattaatatatgatcgccggtggccacaaaagacagaatggcattggtcaccgctgcggcgccgcaaggataaagcgcacaacctgcgccgccttccaattccaccatcgcttcttggaaggaaaaatgggtcagcgtaccgcgacgaccataaaacaattcgccttttgcccggtttgctgtggcaaattttttcgcctttacggaatcaaataccagggaagaggctcgttgaataatggtgtttaccgatccttgggtaaattttttcgcccgaccggcagtcactaacgctgtttctaattttttagatttcattattttttccttttctggtgctggcatactcaaatattcacagcgacttacggacaatccgccacgctgtgtcgttatgtattaacaagtaggttcattcaccgcaggaagctcagcctgccgcttggaggattttttaccggtatatctttcgataatttgggctgcattaaggtcatgaatgacgttaattagcgttgcaggtgcatcggtaatggtgccaataacaaccagcattggaatagtttcaaccggtagccccagcgtggtgacaataaatatttcaccgaggaaagcgccaccgggaacgccgccgacaataatggcggagagcaccgaaatcagcatggtcaggaagaaagtctcggtggtgaaatccaatcccagtaccgagaagataaagacgattttcagcgcggcaatcattgccacgccgcctttatttaaattaaccaacagcggcagagaaatatctacgatttcagggttaatgcccatcgctttggccgctcgaatagtcactggcagcgatcccaatgaagagcaggtgcctaaggcggtggctgaaggttcaatagcgtgttgccagaaagcccttaccgctttcatgccgccgccaatccaggaataaaagatagagccgaaaacgtaatacagcagcgaggcgataaagaataagccgatggctctggcgaaagtcatcagtaattgtggatcctgactggccatcgtcgcggcgaaataactgcccaaaccaacgggtgccgctttcatgatgattgagacaatcttcataatcacggtatttaagcccaacaaagacagggcaatttgtttaccttgctcgcccgattgcccaatcgcaataccggcgataaccgacataataatcagcgccagaatattggatttagacaataaaccaacaaaatcattagtggtgaccatattcacaaagttcatttcgccgctgccggccttgaactcttgggttaattcaatagtgacgccctgagccggatcaaataaggtcgctagcccaacgattcctgccgccggaatgagcgccataatgatagagactgcaaaaatcagccccattatgcgccccagttttttcaaatccgtcataccggcaatggacgacataacgcttacgctcaccaatggaacgataatcataaacagcaaattcaggaaaattttaccgataggctgtaatttgagagccagagaaggggcataaatacctataaccccaccgagaatcagtgcaaataaaagaataatagaggacttgtagggttccaaacgtttccacataggattttccttggtgtattatttaaatttcatgtgacttcagtcaccttttatttttctttcggcaagcaaatatcttatctgtgattaagctcacctttttatttcttattcttaatatgaataacatatcgctattggtaataaatgattacatttgtagtctacaaatgaaatacgacattgatgccatttactaaaatcactaatgagctgaaggaaagaatgagtaatatcgcatcgctaaaacagctggaaatactggtcaagatcgttgagtgtggtgggctgtctgaagccgcagctcagctgaacatctcgccttctgcggtcagcaagagtctgtctcatctggaatcacagctgggcactatgctgctaaaaagaacgacgcgtagcctgacgttaaccgacgcggggaaatatctttatcatcgggcaactaaattattattagattttgacgaatctcttaatactaccgctggattttataaccacccgcagggtgaattacgcctcacctgttcaattgcctttggttattctcacctcatcactttggttaataaatatcgagagcgttaccccgatgttgagttatatatagatctaaacgataactttgttaatttaaatgagagtaactttgatatcgctattcgcgttgcatcaactccgccagataattattcgttaagaaaactgtcgactatccactgggcttattgcgctagccccacttatctggaaaaaatggggacaccaacttccgtccaacaattatcagaccatcagtgtttgttatatcccggtttgacaccggtattaaaagataccgacgaaagcggcagcgctcatttacttaagttacgctcaccgattcaggcaaatagcagcctggtattgctgaaagcggtgctggaacatcagggtgttgcctatttgccgacttatttactcggcgatgctattcaacgaggtgaaattactcctctggcgcttgatggggaaataacccacgcgactcatggcctgtatgccttgtatttccccagccgttatagcaatcccaaggttcgttcttttattgattatctggtggaaactttgcagcccgtaccggtatgggataattggatcacccgaaggccctgacgttaatgacgaattaaatgaggcaatcaggatgaattgggctggctgcaatcccttttgtcgttctctttatcggcctagcctctgccttagccgccgtttgtgataagccatgactctgctatcatcaacagagttagccgtctttgtaggatattctgtaggataatcatctgcataaggcatgaatttaggccatgaggaatattatgccgaactcattcaaggataatcagacttcatccagcgcagatactgattcgcagcagagcaaaacagcgccgttaagtgcaggaattgaaaacggaaaaaaagctatttccgtattaacccgtcttggcaatcggattaaaacctatcccagtgttgcgcatattattcgcgctaccgatcgctttaacgatcgattaggcagccagtttggcgctgcaatcacttatttttcctttttatcgctcattcccattttgatggtttctttcgccaccgtgggttttgtattggcatctaatccagatttgctggccgagttgatcaataagatcgtgaatagcatcagcgatcccagcctggctgctaccttgaaaaatacggtaaataccgctattcagcagcgtactaccgttggattaaccggtttagccattgcgctttattccggtatcagttggatgggaaatttacgagaagcaattcgcgctcagtccagagacgtttgggagcgtaatccgcaggatctggaaaaattttatgtgcgctacacccgtgattttatttcgcttaccggtttggtgctggcgctgattattactctctctcttacatcaattgccggttctgcgcagtctgtgattgtgaatgcgttagggctgggtgatattgaatggctacgaccggccatgacgctaattgcgctgtctatttccatcgccgcgaactatttattgttcttatggatattctggattttgccgcgtcataaaccaaaaaagaaggccttgctgcggggaactcttattgccgctatcggcttcgaaatcattaaattcattatgaccatgatgcttccgcgtcttgccagctcgccttcgggcgcggctttcggttcggtcatcgggctaatggctttcttctatttcttcgcgcgtttaaccttattttgcgccgcctggatcgccacggcgaaatataaggatgacgaaaccttgcctgaacgccatgcctaagcggctgtcagatgcccgccgtcaacgtgcgagaggtttttctcctatcggcgatgaagcctttgccgcgcgttggaatttaaccctatactgctggctacttaatcgatcatggagggtcagttaatgccacttttatcttatcgtcgatggattgctttgggcgtattggtactgatcgccgccattgcggtgtatgcgctgcaacccaaaatcgggaatccagatgctctgtggcaaattgttagccaacagtgcgttccccatcagcgccagctgaattcccctcaaccttgcgccgaagtgaatactcaggccggttttgcggtgtacaaagaccgtaacggaccgctgcaatacttgttaataccaactgaaaaaattaccggtatcgaaagccccgagttgttatccgcagcaacgcctaactattttgctctggcatggcaagccagggattacatggcgctaaaatacggtcatcctattgataatcaaaatatctctctggcggtgaattcagaattgggccgcagtcaaaatcagctgcatattcatatttcctgcctatcaccgaaagtgaaaaaagcgctggcagatcaaagcgattcgttccgcccaagctggcagccattgccgaaaggattgctcggtcatgattatctggcaaggcaaatcacccccagtgaactccaggaacaaggcgcgttccgcctgctagccagcggcgtacagggcgctgcggaaaatatgggcaaatacggcttagccatgacctctctgcccaacggcgatttcttactattaaccacgaaacgcgatttgaccggcctgaatcttgcctcggtcgagagtatccaggaccacagttgcagcgtgctgcccgtgcctcctcactaaaacttacttctgcttcatgcttttcagcagcggcgtgcattggttttcttcaccttcactaggcgaaatcaatgccaacaacgccgccgctggcgttaaagccacgcccaacacagccgccaccgcaccgcgagcaattaacggcccggtcttcacacccgcgtccggatttttaaacgtgcctttaacgtacagaggcgaacgcaacgtcagaatacgtaaccctttgctttgcgggtcgattgagagatccaaccgttcggtggcgaaattagcattaccggtaatattgatgatggcattttccgtgtcgaagacgaacagccgcggcgtagccagaccgtttcgcatcacgatatccgcagcagcacagttaatttttacttcgtcatcaccgaagagttttgccactatgtagttacccacgttcagccccaataattccatcaggctgcggctgattagcccctgattcagcaatattcgcaggctaccattactggttcccaacagcgccgccaccgagttaccccgagccgtgaaggaagcgtcgccattgagctgccccagactgttacgcatcgactcgacttccggcagcagctgctttaactggaatcgacgcgcgtgaaggtcgatgcgcccttgcatcggatttttattaccattcaggcgtaaagtggcgttgagattgccaccggcaataccgaagcgcagcggatcgagtaacaactcaccgtttttcatcaccacatgagtagaaagatcgctgataggtaaggctttatcccgctcgatacgtttagcggcgtaggtcacatctgcatccataacgttccagctttgggtttcaaaagcctctaccggcagaattttatcggatggctggcgacttttctcaccgcgcccttttttctgttgattggaatcagcgccgattaaaggagccagatcggcaaaacgcagttgattggagacaacctttcctagcagtttgggtcttggctgactggcggtataggtgagatcgccgtgaatatcgctgtcgccgattttaccgttgaatttttgatactgataaaccgcaccgcccgattgacgcaaccgagcaatcaaatacccatcggtggcataaggtggtgtattcggtaaaagtacaccaatcaacggatataagttacccagactatcgccggagaatttcagccgtagattgatatccgccagattgctcggatcattgagcgtaccgacgatagccactcgcgtagagccggagcgcacatctgcctgaatagggaaaggaatatcagcgttagtcagagaaagcatccccccgatttttccgctgccgctcacaggttgcccttggtatttgccttctacctgccagccgaaaatataatccaccgacgtacttctaaccttgctgtccttcacttcacccttgtcgccaatcacttcggaaaaaggaagaggcttgcccaaagggtcgattttcgcccgtagatccgctttcaataccgaatctttaagcgaaatctggccgcgatcgaacacaatatcgctgatattcaccgaccaatcggaagatgcttcacccttagctttgtcgcgattggcgagattaaaggtccagttgtttttaccgttggccaagcgctgcaaattagcatcgggttccgtcagccaaattctgggaatgcgaacctgcttacccaacaatgccagtggagacaaattagcctcaactcgctttagggtcatcatattatccccaggaatatctggcgggttgccgagtaccaaatcttctgcatgaatctgcggccagggaatccaggcacgccaaccgcgatcgtccgttttgcgcgaccagtcaacgcccaattcgccacgaatggcaaagggacgctgcaattcagcactaaccttttggtttattgtgggttttatgcgattccaatcgaacgtaagaacgaaaatcactaaaacagccagcaataccagcacaattccggccacccaaagcagtaccttcccggtttttgtcataatcgctccacaaaatttatcagaagctaaatccggttcggcaataaacaaaacggctatgggtactaccgctcagcctgtcaatgtagaaaaaagagttaatcgatgaggaacgcggacttagacgcttgtattaaccatagttgaggatcaactaacgtccattattattggcctgatgaaaagcagccaatagatataaacgtcaatttatcagacggttaatgatcaaacgactcatcggttttgacgattatttcacccggacgttacccggcgaataacaggggaagtgactgtaaagtatcaaaatgtgcgggtctggaaagatagtaaccttgcgcagcacaggcatcagatcgtttaaccagcgcccattctttgtcagtttccactccttctacaatcacgcctttactgtagcggctcatcaatgttaccagcgtaaagaacagctgctgccctacctcactttgctgtaacagaataaataaatcgcgagctattttgatgtattcatagcgccaactgacaaaagacgagaagttagccacaccgctgccaaaatcatccagccataatcgatcggcctcagcgatttgagcaaacggagtaatacaggcggtatccatatgttcgaccagctcaaaacgcacataaggcatagaatcaataagctgccgcgcttcgggatcgttttgcatctccatcaatgcctgaccgtcgatattgatcgataccaacattgagcgatgggtaaaaataccgtgccattgcttcactaattccaactgttctaacaccacgttcagacgcgcccgaatgctgatagaggagaaataatcctctggtgagagtcgggtttccggcgaggagggatgataaacagccgtcaataattctatcgccagtaacttccctgaagtgcgataaataggttggaaagtatacctacgctgacattgccgccaaaagttgaatcccttattacaatcctgagcggcaagggatggcgcaagtaaatctgatattttgttagttagcatcagttttgtcgccatatgtcggggtatcaggcagtcaaagctcatactatgcttactgccataaagacgctccccaatgagagcgttcttccttctggagatgttatcgactcgttcgaccagaactttatatgtgagccaggcagattctcaaaactgcgaaatcgcctccaactgagcaacgaacgacaaaccggcaaacgtgattgagttaacgctaacattaggataaatggagaaaataatgccatacgtaaatattaaaattacccgtgaaggtgccaccgccgaacaaaagaagcggctgattgccggtgttacgcaactgttagtcgataccttgggcaaaaatccggctaccaccgtcgtggtcattgatgaagttgataccgataactggggtattggcgggaaatgcgtaaccgaactgcgaaaagccccctaattttaacggaacaaacgggaaacctgtcagtttcccgacctaggtcataaaaaatataaaacgccattttaattctattgactcacgcagaaccagcagagagactaagcctatatccctcatatcgagttttctttagaaataggccgctttccatgaccagcaaaaagattgccgttatcggcgaatgcatgattgaactgtcgcaaaaaggtaacgatttgaaccgaggttttggcggcgacacgctaaatactgcggtttatattgcccgtcaggttgacgaagaggcgctggaagtccactacgttactgccttgggcgctgacagcttcagcgaagacatgttggcggcatggcagaaagagaaagttaaaatcgatttgattcagcgtatggatgataagttgccgggcctctattttattgaaaccgacgagaccggtgagcgtactttctattactggcgcaatgatgccgccgcccgtttttggctcacggggccgcaagctgataaaatttgccagaagctggaaaacttcgattatctctacctcagtggtattagcctggctattctggacgcctccagccgccagcgcctgttgaaactactgcaagcctgtcgtaccaatggaggtaaagttatctttgataacaactaccgcccgcgcctgtggcagagcaaagaagaaactcaggaagcctatcgcgctatgctgtcctgtactgacaccgcgtttctgacgctggatgatgaagatatgctgtggggcgagatgacgctggagcaggctatcgatcgcactcaagctttgggcgttaacgaaatcgtgatcaaacgaggtgcagattcctgcattgtctggaatcgggaatccgatagccagcggcccgcggatcaacatgtggtacccgccgtaaccttgccaaaggaaaaagtcgtcgataccaccgcagcgggagattcatttagtgcaggttatctggccgttcgcttaaccggaggcacacctcagcaagccgcagtgcgtggccatttgacggccagtactgtgattcagtatcggggggcgattattcccatcgcggcaatgccaaaagtctaagccaaacgagatgtattgacgggagagatagaaacaatattcgggaccagaaaggccccgaatatctgatttgaacacccggttttactgcgcggtcgaagcttccggcggcgtcccttctggcgtggtgccttcttgcgtcgttccttctgacgcaacgcctggcgtagcttccggtttcacttcttccggcgcagccattggcgtacccgatgtcataatgctgttatagctttcctgcaatgctttcacgctgacttctggctcacctttcggctgaaccagaaccaaagtggtatcttgcgaaagctgttgttttagctcctgattcagattggccaacgttaagccggacaggaaggtttgtcgcagcttctgatattgctcaggtgcgatatccactacaccgctctgctgagaacgcaggcgctgactcatcaacacatcggtatcagtacgggcataagtcgcgaacagcttgcttaactgatcgtttttctgcgccatcagtccatcaaattcagcctgactcagcccattagcacgaatactggctaattcattagcaataaacgtcatgccggaattcagattttccgttggcgtattcagatgaatcgcacactgagcacgttggtattgcacccggcaatcaaagcccagcttcatattcttctgaccgcttttttccaacgcctgctgcatatgccagaacagcgcttctcgcgctagatcactgcgccaatagcggctaagtgcctgggagtcctgtatcggatgccacggggtatcccaaattagcgacaaagtgtcctgcgtcacctgctcgctcatcaggttcaccggctgaggcggtaaaggagccagcatcgcgatagaagacggggtctgtcgcttcccttccaacgaagagaaggttttactgatttgcgccaccaaactacggctatcgacattgcccacgacatacagcgtcatcgcatctggcgtgtaccactgtttgtagaattgcttcagtttttccgcatcaaccggaccatttaccggctgcccaggatcgtgacccagcagtgaagacccttttaggcgatagcgccaccaagtgtcctgtacattttgcgggaaagtagcaatgggatcattaggaagattcagcgcagcattcaccgtttgctcgctgatggccagcttaccgctggtatcagatagccaagccaaagcctctttaatcaaatcagggcgattgtttggcaggctcaggctgtatagcgtgaaatcataagaagtaatcgccggtggtaaagggcgctcgttatcgaccccttgctgccacagcgattggagttgtgccggagtaaagctctggctgcgaataagcgccaaacgaggtaacagatgggcaaagccaacctgctgtgcgctttccgacagagatccggtattgaccaccagacgcatctctactctatcacttgggcgctgcggcgttgccagcagctgccatgtaaacccgttttctaactttccctgctgccaggcaggatcgggttgtagtgcttcagcttgcacattgccgctggccgccgccaacaacaatccaccaactataagacgaattctggtgccctgcatgtgaacccctacttaataactatccaatttaaaactatccaactttcaaagaaattacacgctcaaaacagcccaatgatacgaaactcatcggcgtgtgcttatgttggataaaaaaactacgctcatcacagttatgaccgcggaaaaagcaagtgtaccattctgttagaccgcatgcttttgccgatatcacccatcactgcgaaaaataatgttcaacgggcaatacgagcgaaaaatggtagtgattgactatgcagaaaccaccggtaacgatgagctaccggtggctgattgactaatctggtgacctaaaagaatcaggaagaggatatctgcccttctgatttacctgccggactcttattcgacaatgtcgcctgcagttgatcgttatccaactggttacaccatttcgcgaccacaatggtcgctacgccgttaccgaccagattggtcagcgcccgcgcctcagacataaagcggtcaatacccagaatcagtgccaaaccggccaatggtaaatgtccaacagcggagatagtcgcagccagaacgataaagccgctaccggtcacgccagctgcgcctttagaggacagcagcaataccaccagcagcgtcacctgatgcatgatatccatgtgggtattggttgcctgagcaataaataccgccgccatggtgaggtaaatggaagtcccatcgaggttaaatgaataacctgtcggaataaccaaacccactacggattttttacagcccgcacgttccattttctccagcatccgcggtaatacggattctgaggaagaggttcccagaacaatcagtaattcttctttgatatagcgaataaatttgaagatattgaagccgttagcgcgcgcaatggagcctagcaccaccaccacaaacaaaatacaggtagcgtagaagcagacaatcaattggcccagttgcaacaacgtacccacgccatatttaccaatagtaaacgccatcgcaccgaaagcacccagcggagccaggcgcataatcatattgatgataccgaagattacgcgggagaaactttcaattacgttaaagataagctgacctttttcgcctaaacgatgtaaggcaaaaccaaacagtacggcaaacagcaagacttgcagaatattaccgctggcaaaggcgccaatcacgcttccgggaataatatccaacaggaatggaattattccttgctgagaagcttgctccgcgtacatggcaaccgctttagcatccaaagaggcaggatcgatattcatccctgctccaggctgcaccacgttcacaataaccaggccgatcaacagtgcaatcgtacttacaatttcaaagtaaagcagagcaatggcacctgttcgcccgaccgctttcatactttccattccggcaataccggtcacgacggtacaaaaaataaccggagcaataatcattttaattaatttaacaaatccatcgcccagaggtttcatctgagcaccgatgtcaggataaaaatggcctaataggatacctaacgtgattgccgttaatacctgaaagtaaaggcttttaaagatgctggttttcatatcaatgtccttttggagaatgcacggcaatgtgtcgttatggtctccgcaaatgaaagggacgcttcatttttctatccgcgctagcgcgaaaaataacaccccaataacaatatgtaagtcatttattatcgtaaattgtcccattaacacgaaactaagaactgaaacgcttcaagaaaaggtaactggagtggagcagtgaaatattctttgctaccgagccggtctgagagacctgataagggaaaggataaataagagaaggtggggatattgcgaaccaacgttgaccggacaaacccgatcaacgtggcaggaaactggcctcaaactcttcgcgcggcaccggacgggagaacaggaaaccctgcccgctcgtcacaccgtggtctaacaaccattgacgctgagcttcattttctacgccttcggccatcacgcgcagtttgagcacattggagatactgccgataattcgcgccatcgcatcatcctgcggtagcgtgtggacgaaacttttatcgatcttaatcatgtcgatgggcagacattttaggcgattgagataatgcaggctggaataacccataccgaaatcatccattgcgatggaaacgccgagttcatgcagctcacgcaacagtagcaacgcctcatccagatcgggaatacgggcagtttcggtgatttccagcattaactggctggcatcaattttgtaatgactgaggatagttttgaggtgcggtaaaaacgtctcatgctgcacctgcaaaccggaaatattcaccgccaagggcaatttaatgccttgtcgctgccagtctgccagtatccggcaggactcttccaatacccaattacccagcggcaccataatgcctttttcttccaccagcggaagaaaatccaccggcgagaggtaagtaccatcggcctgattccagcgcagcaacgcctccgcgcctatgactttttcattacgcatgtcccactgcggctgtaggtgcaatataaaatcacgtttctcaatggctcgaagaatgtcattttcgtaagtcagatgcttttgcgttttttccgacaaatgctcttcgtaatagagaatctgatttttacccttatggtgggctgccaccatggcagagctagcactgcgcattaaatcttcagcgctttcatgctgattaagatattgcacgatgccaatactggctttcggacgcaactgcatgttttcaaaggtcagaggagcggtaatctgcgccataatccgccgggcaagctgcatcgccgggaaaggtcgcgatatctcttttgccatgacggcaaactcggttttactcaaatggcccagcaagcagttctggtcaatgcactgctcaagctcctgcactatggtcagcaacagctgctcatgctgatgttccgtcatgacgccggacgcttcatgcagcgtttctatgccaataaccaagaggtgaaatttttctggtcgaacaggggaatcaatgtgctcattcaacatggctaaaaacagcgtgcgattcggcaattcagtcaccgggtggcggctgctgatacggctcatttccgcataggctttcgctaacaaatgctggttacgattataatttcgcgccaatacccctaattcatcatcaagatgacgagcgggcatggaaagctgatgatctaacacctgatcctgagagatattctccagttcacgagccattgagcgcaatggatgcacgattaaccggttaatacaccatgtaattgaaacggaaagaatcaatgctaacaacagataggttgaaagcatggtggataaggtattaagaataaattgataaatacggtaagaatcagcctgtaacaccagataagccaggggcttagggttggcggggactctttctaatgaatagagcggaacggtaatttgcaccggcagattaaatacccggttaacccaattgggtaccggctgctctggcttaaaattagcgtgtaatacctgtagctcattaggcaacaccacatctgcccgactcaaaatcccaatcggcaatgtgctctccagcacacgtttagcacctggaatatcgacgctgagtatggccgaagaaagggggtttttaacggaatacgcgatactctccaactgcttggcgtagtcatctttgcgctgctgcacaaaatggaacagttgaatgacaataaagatacaaatcgtcaccagcgccacaccggacaccgttgccatttgctttatcgttaacgaatgcctaacccgcaaactttttctccgcctatcgtacccgtaaaaaagcggctttatcatcaagccaaccgccaactcagtctgagtatactcgatcgtctgccgattttatcttgcgagactaaactgatgggcaagaatatcgcgggttttggcgttttcctatcaggatcctgctttttatagcgtaaaaatcacttttagagcagtttttcaccaggtaaaccgccccgaaagattatttaaaatcggcgtaaggtaccaacggctgcggcggcatatccagatcgccctgccagcccgccattgagtatcgcagatacaccagtgcatgacttggggtgtagtctttcgcctgctgaatatcaataccggcacccagcgtccagtgagaactgagtcgccgctctatcagcgctcgcagggtataacccacgccgctgctgctgtcgccgaactcggttgcgttgcgatctctgatttcctgcaagcttggcgacaataaacctttcagcggataacgcggctcatcgctggttgccgaatgagaaagagaaatcgagccacccagttcccatgaccagttttccgtgcgctggcgataattcaccggaatagccacagacaggtatttttgcggactgtaatagcccccttgccccaaggtgtagccgctgaggtctttttgatagtgccaccacattccgttcagacccacggaaaggcggcggttatcttcgttaatcagcttgtagtaatagccggtcatcaaacgcaggcgttggttatccgcaacgttttgccccgtcagataatggtaactgacatcgctccagactccgtgcgcttcgccacgatcgtaactggtacccaagctgacgccgttggcgcgaacgccgccccaggtcacattggtattgggatcttttgttccggcaaacgccagtaatgaactggaaatcgggcggcgagatgccgttgctgtccagccaatatggttccaatcgctgctataactgacgccaccgaccacatcaaccacatcaaaacccatcggagtggtaccgatatccgtttcccagctatcgttttgccaaccggcggcaatactggtaccggttgcccgctggcgcatgttagctacacaaggattttcaacgtcatagcaggtgccagccttatagcgttcattggcattgaaagtacctgcatccatttgaatggtatcagcacggaagaacgcccgtccatcagacagcggcgtatccacctgtaacatggtgttgtgggcattcagatcggaaataccttctgttccgctggaacgaacataatcatgatccagcgtgacccgcgtatcttgttgacgatacaaatcggcggcatcggaacggataccgcgtttcagccagtcatccgtagcctgattgcgcgtaagaagcgtgtagctgtcgttatccgctggcagcgttggcgtgatgccgctaccaaccatggcccgcttataatcctcctgcgccaactgcggatcgcccagtttttgcgaaagacgcgccgaatcacggaacactaacgcgttagcctgagatgggccttctttctcagcctgtggtttaagctgctggaagatggccgatgccttttgtggatcgcccacgccgctccaggcattcgctacacgccgctgggtatttagtgttgcatctttcgccaccagagaatcgccttgcagaagctggcgcgcatcgtcggttttcccctgagccaccagcgcttcgatttctcccaaacgagcgtctggattattgggttcacgaacacgaataccgcgatagccggctagcgcctgcgcgtagtcgttacgctccagcgcccagtccgccagcgtcatatcaatacgcgtactcggcggctgctgacgtaataaagctatcgccgacggttcatccccgccagtacgtagccgttgggcattttccaatactcgttcgaattgaagtcgttgatccaattcgcgaatatcatcattccattggcccttaggaagcgtggccaggtggctaagtgcttgattgtctcgctcggtgctagaaagatatagcgcataagcataaacctgctggggatcggccggtttgcgtaccgccaacccggcgaattccctgtcagcctgctgcggctgcccgctttgatacagcgcctgcgccaaacgataagtcagccagacatcgtccggcgccattttctgcgcctgtcggtatttttccgctgcctgatgccactgttgctgcgccgcgagttgctcggcctgctgtttcagcatatccagcttcagcccgttcagcgtgtcgcgcattttcgcctgttgtcccgccggtaaaccgctgaggtaagccatagctctttccggagactgacgctggtagatatttgctagaccgcgcaccgcactgctgttaccgggttccagacgcaacgcctgctggtaaagctgttcagcggttttatcatcatggcgcgctacggcaacgtcggctaaacccagtaccgcgtagctgtcgctgctattaagctggcgcgcctgctgatatttctgctgtgccaaatcagggttacccgctttcagggctttatctccctcatccgcgagtaaccaataatggttggttttaatcaggctggtccatttatcgctgttcagcccagttttatcgactttctgcgcctgttcaaacaaactagcagctttttgccgatctccggctcgcgcataggcgatacctaatgcgcccaaaacgtcggcgtcattgggggcagtagaaagcgcctgtttcagatcaggaatggcattgcggctctcgccactatccactcgggacaatccggccaagcgtgcctgatagctgggatcggacaacattttttcctgccgagccaattcgatacgcgctttatcacccgcggtaccaccggcgaaaacatcgagaaaacgattcaacagagaaatactctgcgggctaacaggcaacgctttgatttgatccatccacaaatcggcagccggtgagttacccgcaggatccgcagccattttttggagtaaagcataggcctgatcatcctgtttttgactaaacagcattctggctaatgccatacgcagcggaatattaccggggaactgttgatccaaacgctgcaactgcttcatcgccgtctgctcttgccccggcaaacgtgccaccagccgccagtattccaccgctaaatccagcgttggcagctcacctttcagtagcaggtcatattggactttcgcttcctgaacgcggccagcggtggccagcaatcgcgcctgctgtaatttctgcatgacttcgggctgcgtaagcgccagcgccatttttgactggcgataaatatcggaattcggggcaagctgttgcaacctatccagctgttttttcgcctcttccgtgttcccttggcgcagtgcctgacgtattcccgccgcagcaacttccgggttatttggatccatcaggctgaggcgatacaaggattggcgcaccagttcatctttatgggtagcttcccccagacgaacctgttccagaagaaattgagcgggagcaacggcctctgcgcctttagcctggggcaataacgccagactaaaaggaaatacgctcagccagtttaatttgaagttacgcattgactgccccaagagggtaaaagctcaccctgccgattaaaacgataacgattctgtgcccatccctgaccataaagcgtcaaaacggaactgtaataagcgtcggagccgggaggtgattcttccacccgctgcgtctgttttttcaatatttgtgagccacttgccgttgcgctggcgcttaacaacggcaatagggcggccgagaaacctacaggcccgttgcccgtcgttttgccactggcggtatcggttttctctggtggaagcccttgctgctgcgtcacttcaaccatcggctgaaaacgttcgattagcgccgctttctgtgggctgtcgtccgctaacataccggcccagagataaactcgaatggcatcgtagctgccgatattgggtttcactttatccggctgccagccgttggttttgcgccacaccacccaatccggcgagaatcctttcggtgctgtttccagccagagtcgctgatttaccgactccattgcctgccacggcccttttttcatactggcaaaccgcgccaataactgtggcggctgatagctgggattgacgcgccaggtatcttcgtcaacaaaacccacttttcccggtaatagcattcggcctaaacccggaatatgcgccacctcttctttggcaatccgctgcaatagcagagtccccattgtggtgtagcggcgactattccacagccgtccggcctccagcagatcgtaggcaatccacagatccgcatcggaagcggaattgctatccagcacgccccaggttttatcctttttctgcccccacgaccaagcgggcaggcgagcggttaaatctcccgccgccagattgttttccgtccaatccaacagcaggttaaaagccgcgcgatcgttagctaccagcgcaaaaaatagcgcatagctttggccttccgaagtggtcagcatttcggggacgctagcatcaataacgcgccccccttggcttatatagtgttgtttgaactgctgccatgcgggccaatgacattctgccgctgttgccccgctataggccaacagcaacaggctgcatatcagtcggttaaacatcacaaccataaaacctagtccctctcatctggagataaacgacggcggctcactgcgcgcagaacccgccacaacatcacggcaatcagcacgacaaccagcaccgcaaccgcagccagcagcactggatgggtggataaggcgtaccagatgcgttcccaccacggcagatggccgacgctgtaggtatcgccaacccgcagactgttaacgccggaatcacgaatcaccgccacggaaccgaacacggccgcacgtttgccagtatccagcaaagcatcattcagcaattcataaccctgcgggctatcagccagtaatgcgacgatgctgcgttgatcgtaataaggagattgaaccccgataatcgccgacatggcgccttcggagctgatggccgttttactatcaggcaccgcatccgttggatcgatagttgccgccgcgacaatcgactggcgattcggcattttcacccagctttgagtcgcatcaaccaacaggttgattttcttatcatcccgcagttctggcggaatagagccaatcatcagaatatcggcatctttgtccttcgcctggctccaatcatcggtaatgctgatgcccaccgcaggataaccgacctgcgcaccgatattccccaccgtattcaacagtgcggtaacctgagcgggctgcggcttaggctgtaccaaaaccaaggtttgggataaatcggccatacggctgaatgggaagcctgcattggcaaatgagcgcagatccggcatttccataaagtggcgataaccggagaaatcgatcgtggagttttcgtcgatcaccacatggttaggcgaggtggtgaaggtttcgcagcgccctccggcattgctggcaataagcgtgctgtaatcgaaatcaaagcgcagttgattggtcatacccaatttcagcgccgggatcgtcaccgctcgcgtgccgtcttgtagaccctgaatcaatggtaaacgcagaattttggcgctttcctgacgattaggcactagcggataatcggtaaagaactgatcattcaggctgacgcttaagcgtgagccgtctttcaggatcggtgccgtataacgatatttcagctgcatatcgataccggcactgcgcagcaagaacagatccggcggcagattcatcgaaagcaagatcggtgacggcatcaacccactactttgtaactgttcaggatattgctgtagctcggcaaaggtcatgggtctttcggtacgcacccagtttggcgcatcgtaaggcacacgcggagccagctgctcaactttgtctacggtcacattttgaccgcggaacagaatgttaccttgagcaatacccgttgccgccgcaatcagatccttgtcatcccgcccgagaaccagcagtagcttcacgtaaggattatccgggtgactgatcatttccaccgttggcgcattcaccgccggataatctttcagaaaatcaggccgtttgtcattggtggcaaaaatcaccccgtgacgatcgggaatctgattgaaaactgcagggaagtgttgaccgcgccactgagcttgctcaccaaaccaggaagccagaattgcggccgctttttgctgagccacatcaggagccgctgcaaaaacaattggcaatgttagcgggcggttatctcgcgcatcgaagaaaggctcagggaaatgagacaaatcattcttcagcggcagtgactgatagcgtaagtccagcgagctattcttaccgatatccagccacagcgtactgtttgccggattttcacagtcattctgataatgcccgataaagaccagccgcagacggttgaagtcggtaatgtaacgaggatcgatggatagctggatgcgattcggtttacccaattgttcgcgggtaatagccgtcacgttcattagctcatcgttcaggtagactttgagctgcgattcgatcggcgttagcgacggcgacggggtaaactccagattcagagttgcctgtgtcaccacttcatcgctacgtacgccaaattccaactgaccgtccggcttaacgccccctagggagaaattgcccggcggcggagccaatttggcaaaaggatgcaccacatccctcaccggcgcggcctgcggtatagcactatccgcaggcgtaacggccaacgaaggatcgactgccgcgggagaggccaacgtcggctgttcggacgccgtaacggttggggtcgtttcggcatgagacagtgtcgttagccccaaagccattgctgtaaaccaggttatttttctaatcatcatatcatcatcaatgttgagccactgtctggtcctgactccgcagagtctgaccctgtcctacgccatgaggaacaaatgacgctacccacgcaagcaaagaggtaaatccaaccagtacattacgaataagcggcggcgcgtaattcgccatacgaacataaccccggaaacccaacgccagaacatcgcgcagactttcgataggtttatcttcagggaaactgtcctgccacagcgcccaggtatcggcgcgggcaaaagtacactggataaagtcgatgtgctgagccacgctcagttcgtcaatacgcatcccgacttttctgccaaatgcccgagtgaccttgcaggggaagatgtattcttgctgaccgcgcttcagtagcaaattgaccgcctcgccgtcctgtaatagcccttcgttacgcatttcaatccctacgccaccgtcggaatagtcacgcaatgtacaggcaaacaggtgaccgtcttttcgctcaaccgccgcgggcatagcaatttccacccggtgcgcctgacgaacctgtttagcttcaaccgccacggccacggcaccacccagaatcgtcatgttgtaaataacccacaccaaactgattatcaccgtcatgatttcgttggtcggcccattccccaaacgccacaacccggcaatcaatcccgccagattgagcagcaccagcgcgatataaggacgggtgataacccaatccacatgttgctcttctatcaaaccgcctttggccgttacgttaaacttccctttatgcggattcagtagcgcgaccgtggttggacgggcgatataccacgccaatacggtttcgtagatttcactccagaacgagtggcgatatttaccctgcaagcgggagttggtcaggctggcgtgaatcatgtgtggcaagacgtacaacgcaatcgccagcgccggagcaaaaatgatgtacgcatgcatcagcaagaaggctagcggtgcggttaggaagatcagccgcggaataccggccaaaaagtgcagcatggcgttggcataacacaaccgctggacaaacttcagccccttgccaaacaacgggttatccagccggaagatctgcaccatgcctcgcgcccaacgaatacgctggccgatatgcgccgagaggttttccgtcgccagccccgccgcctgtggaatacgaatataagccgaagtatagcccttacggtgaagtcgcaatgaggtgtgggcatcttcggtgacggtttcgacggcaatgccgcccacatcatccagcgcgctgcggcgcaaaacggcgcaagaaccgcagaagaaggtcgcgtcccacatgtcattcccgtcctgcaccaaaccgtagaacagcgtgccttcgtttggcgtctgacggaaacgtccaaggttgcgttcaaaaggatccggcgagaagaaatggtgcggcgtctgcaacatacccaactttggatctttgtagaaccagcccagcgttagctgtaggaaagagcgggttggcacatggtcgcagtcgaaaatcgccacaaactcgcctttagcctgcttcaacgcatggttgatattaccggccttggcgtgctcgtgggttgggcgagcgatataattcacgccaacctgatcggcaaaggctttaaattccggtcgattaccatcatccagaatatagatattcaccttatccttcggccaatctatgcctaacgccgcgtaaattgtgggttttacaacacccagatcttcgttgtaagtcggcaccataagatcgatggtcggccaggtcgaaatatcctccggcatcggtaccggctggcgattaagcggccagatagtttggaagtaacccagaatcaacactacccaagcgtaggtttctgccaatagcagcagtaaaccgcagaccaggctcaccgggtcgtcccaatttagcgtttcggtatagcgccaccacagataacggcaggaaacggtaagcgatagcacaatcagcattagggtaggcaaacgccccggaatacgccgaaccaccatcgcgatcgcccatagcagcagaacaaacacaaactgcgccatcaaaccaaaaggttgggaaatacaaatcagcgccagaattccggcaaaaatacccaatgagataaacagaatgcgtcgggtacgctgctgcaaacgaccgacccacgccactaacgcctgctcccagcgactttttttgactttttccggcaatatattcagccaggagcgatagctcagctttttggtgcgaacccagcccggagccatatcgacgggcttcggttttttctcccgcggttgagacgaacgcgtcaacaccagccacaggccttgcagcaaataacgcaccgcatctgccaagcgcggacggcgattagcaatatgcgggaaccagtaacgacgattctgaattacattttgccagctcggagattcaagacgcaaaaatagccaccccagcgccaccgcgaacgtggtcaaaaaagcggtcagaatcgtgcagccctggtccagatagtggttatatcggtgctgtagcctctgatagaccggaggcataaaaagtccccgaattaacaggctcatagatttttttccgcgccgtgaatcagacaccaatttgccagcgtattgatttcttccgcagccagactttgcggcgcatattcacccaacggctgcttcgccgctaacgcttccgcaacggcttcatcacgatgaataaatagcggcaataaattgcgcaaactttgtagccacaattgatgcatatcttgctgtaagtggctggcagaagagaattgattcaataggaaatgacagccaaccggcagcgcctgttggtgcaaacgagcatgaatcgcagcatcggcggcgatcagcaacagcacgtgatccgccaacgccagcgcttgctgagtgagcgggctatctcctgcgggaacatccagcaaaatccagcggtgatcgccagctgcctctaggtcagccagcttttcctgccagtcgaacgaagctaaagaaccggacaaatggcgctgctcattcatattgagctggccaaaaggcaggaaatccagcaaaggcatataacgcatggcttgctgctgccagcgattaccatccattgccgcccgcgcccagccgttcgcctgttcgtaaggcatattaaaatggagacgtaataaattatcagacgagaaatcaatgaccagcaccgattcctcaagctgttgtaatgcccaagcgagtgcagccgtaatggatgtcgcaccaacaccgcctcttagcccttgcaccgcaatcactggcataagctatttgctccccgagttttgcgccaattcggctaataatggccagcgcgccatcatttgcgccatacgttcctgacggacaatatcgatataacttaatttgggtaatgcgaatgctcggcttaatgctagtagatcgtcctgaacctcgggagatgaattcacataaaaccgattgattgaagtattcattctgctgcccttgaaaaataggctagtgtaataaagtattttgattattagagtatactttgcctaataagataagtcttaatttaatatcctagtacagagttggttaatgtgagatgcgatgatacaattaaagcatagcatttctttttacattgacctgtagaacttcaacaaaattagaagcataaaaatctatgttgagaacattctcgttaggtattgataaaatttgggatgaattagccgttgtgcaggcttcaggtctctattggatcaatatagaccgcgaaagtgacgctaatctattctgccaacagataattagagaccagcccaaagatacccgctcggcattgatttgttctggccaaaaaccctcgaatttactagaaaatattgtcggctacgggccggaaaaactccctttatttactctgccggaaaaaaaagccgccgttaaaaatctcgtcaatgatttgatgcgctcattaagaccacagcgacgtttttttattttattggcccatgccagcttatggcaaacatttacaacggaagaaattcagcgctgggtaaaggaattaaataactggctggaaaaatatcaggccacattagtgattctgagtcatggcagcggcgtcagtaaacttaaaacgcaattagttaaccaacatcgagcattgcaaggacttgccagcctgcaatggcagcacgatcacgcccaatatatggtttcctggtggagcaccctcagcggcgttaccgcaaaccaattggtaaaattgcagccaagcccggaaggctggcagatggcggaagagaaagaacagcagccattggcgcaatctcgtaacgacgagtatatctatttggctgaagccagcgtgctggaaggcgctccgccgctatctaccagctggcaactgtttgaaaacaatcttttattgtctgagaaagcctttaatgctcacgcagcaacgctgattttttcgcttcaccaaagcgatcaaatagatgaactggcgcaccagatacacagcctgcgccgccaccgcggcaatgcgttaaaaatagtggtgcgggaaatggattccagtctgcgttatagcgatgagcgcctgttactcgcctgtggcgtcaatctgattgtgccacatgtcgctccgctatcccgctttctaaccatgatcgaaggtattcagggccagcgtttttctcgtcatatacctgaagatattaataatttactggcttctctgcgcccattgcagctaaagggctatctctcaccggagcaattctgccagtcggtgctagccttgatgagtaacaccctattgccagaagacggcaaaggcgtgctagtagcattacgcccggttcccggtttatcggcgcgtcaggcgctgactctgtgccatatgcgtcgctttggcgacatcgtcacgttggctggcgatcggctggtcgtattcttatccacgtgcagaatcaatgatctggatactgccctgaactttattttccaccttccggtgaatgaaaccttcactaatcagctggtgtggcatcaggatcaggaaatcatctctgaaatcaataagatgaacaatccggactatttacaaaatgtcggagaaaataaaatccataaactgaacaaaactcagcagaaattaacgccgtcagcgcgcagaacccccgtagctttgacgctgaatctgggtagccgcaaggagaacgtttaatgaatctcagcgatatttttcaggttatcttactggcagccatcgtctttttccctttgggttattttgctcgcggccgcctgcccgcatggtgggcgaagaaacaacacttttttctctcagcacgctatctgaaatcagaagggatctggttgcgtgacggctcttccttacatattaagaaataaccatgaacctgaaaaaaaatgcgcaagaatcgcaggcgccatggcgttattggcgcggcctgggcggctggaactactattttctgctaaaatttgccctactctggtttggctaccttaactttcatccattagccaacctggtattcgtcgcttatctggttttccctattccttctgagcggctacatcgtttgcgccattgggtcggtattcctatcggtctggggcttttctactacgatacttggctgccgggcatcaatagtattttcagccatggctcgcaggttgccgggtttagtttcaactatttcatagagttagttgaacgcttcatcaactggcgcatgatcggcgcagccttcgtgatgctggttggttatctgttcatttcccagtggattcgcgtcaccgtgtttatcgtagcggcaatgatcgggctaaacgtgttgaccatcgctggccctgcgttttcgctgctgccgactaccacaacagccgctgataccacggcgtcctcgagtcagaccaatgggtcgggcgccacgaccagtgcgcaacccgcggctgatgcgccgccaaccagcgcaaacctgacggcgtacttaaacagtttctacgaacaggaaaaaggtcgcatcactcaattcccgactacgctgccagctgatgctcaaccatttgatttactggtaattaatatctgttccctatcttggtcagatatagaagccattcagttggaaaagcatccgctgtggagcaagttcgatttagtgttccagaacttcaactcggccaccgcctatagcggcccggcatccattcgcttgttgcgcgccagttgcggccaagaatcccatcacgacctgtatcaacccgccgagcagcagtgctatctgtttgataatttagccaaactgggcttcagctctcaattagttatggatcactccggcgcattcggcaactatctgcaaaatctgagagaagatgccaatatgcgcgcgccgctgatgtctcagactggtattagcaaccaattgatttccttcgacaatgaaccggtttacaacggtttagagctactgaaccgctggctggagcagcaaaagaaccaggcaggagatgcgcgtagcgcgactttcgtcaatattgtgccgctacacgatggcaaccgttttacgggaacaagtaaaaccgccgattacaaagccagagcgcaaaccttgttcgatcaactagatagcttcctgaatgagttagaaaaatctggccgcaaggtaatggtcgtggtggttcctgagcacggcgcagcgctgatcggagataaaatgcagatgtccggcctgcgtgatatcccaagcccgagcattactcacattcctgttggcgtgaagctgatcggtatgaaagcaccacagccaactagcccgctggaaatcaaagcgccaagcagctatctggcaatttcagagctggtttctcgcgtcgtggacggcaaaatatttaccgcaccgagtgtagattggcagacactggttaaaggattaccggaaaccgccatcgtttcagagaatgataatgcgattgttatgcaatatcagggtaaaagttacattcgtctgaacggtggagattgggtgccgtacccgcaataaatctgatgcggtatacaacctaaaaggggcgtaataatacgtcccttttttatttcgtctggacgaataatctatattccctgattagcattacgctaacaaagataaatttacccatttattaatcaatgtcagactattgaagtgaataaatatcctaatcaagtgaatatgccagatgtgaataaatttataatttatatcctcaattccttgatgtttattgacgacagacaataaaactcatttgcttatagagttattcatcttttatcaattctttatttgtttttgttataaaaaaacgccggcagcaacatcaccggcgttgttattaacttcctcagtccatattaaccggccgcttcggcttcatcctgctcgatagcaaaacacgccaccatttgatcgccatactgtttaagctgcggctgtaattggctacaggtgccaaaggcccgacggcagcgagcattaaacgcacagcccggaggcggattcatcgggctgggtagctcgccagttagcttgatacgttcccggcgcatatccggattcagccgtggcgtagccgatagcagcgcctgcgtatagggatgacgcggattattaaagatggcctctttgctgcctttttccacgcagcgaccgagatacatcaccatcacttcatccgcaatatgttcaactaccgacaggtcatgggagataaagacataagacagccccatttcctgctgtaaatccatcatcaggttcaatacctgcgcccgcaccgacacatccagagcagacaccggctcatcggcaataaccacatccggattcaacatcaaccctctggcaatcgcaatacgctggcgctggccaccggaaaacatatgaggatagcgatcgtaatgctcagttttcaggccaactttcgccatcattgccaacgttttctcacggcgttccttactgctcaacgtcgtgttgatttgcaaaggctcttcgagaatctgccccacttttttacgcggattaagcgagccataagggttttggaaaacgatctgaatcttctggcgccgtagtttctctgcgctttcatccggcttcagcaaatcctgcccttggtaatacagctcaccgccggtaggtatttcgatcatggtcagcaaacggcctagcgtcgatttaccacagccagattcaccaactaccgccaacgttttgccgcgttccaaagtgaaggagacaccgtccagcgcttttaccaagcgttccggagcaaaaaagcctttcttcactggatagtattttttcaggtcaatcgcctgcaagagcggcttggccgcctgggattcaggcttcatttcagtttcattgtggttcatagggtcggcctccccgcatcatccaacggtgtatggcatttaacctgacgtcccggcgggccgagcagttccggttcttcgctgcgacagcgttcgttggcatatgggcaacgaggattgagcaaacagccgtcgggacggtcatatttacccggcaccacgcccggcaatgatgctaaccgtgctttatcctgcgcaaattccggcaatgcacgcagcaatgcctgagtgtaaggatggcgcggcgcacggaagatttccgaggctttaccggtttccactacctgcccggcatacatcacaataatatagtgcgccgcctcggctaccagtgccagatcgtgagtgatcagcaacagagccatattttcctgctgctgcaactccagcaatagttcgatgatctgcgcctgaatagtcacatccagcgcggtagttggctcatcggcaatcagcagtttagggcgacaggcaatcgccatggcgatcatcacccgctggctcatcccgccggaaagctgatgaggataaacatccagacgtgaagccggatcgggaatacccaccagcgtgagtaaatctactgctcgctgatgccgagtacgacgattgccgccctgatgcaccttcagcgcttccataatctggtagcccacggtgtaacacggattcaggctggtcatcgggtcttggaaaatcatcgccacttctgagccaaccagttggcggcgttcgttttccgaaattttcgtcagatcgcgaccgttaaactccagtttgtcggccatgactttgccggggtagtcaatcaaccccataatcgccagagaactgaccgacttaccggaaccggactcacccacgatacccacaacctgaccttgctcaatgctatagctgatacggtctacggctttaaacggcgctttttcatcaccaaaatgcaccgacaatttatctacttttaaaagtgccatctctctctacctctactgcttgagtttggggtcgagagcatcacgcaggccgtcccccatcaggttaaacgccagaaccgtcagcagaattgccacgccggggaaggtcaccacccaccaggcactctgcgcgaactgcaacacgtcggagagcatggtgccccactccggcgttggtggttgcgcgcccatgcccagaaagccgagtgctgccatatccagaatggcgttagagaaaccgagagaggcttgtacgatcaaaggtgccaggcaatttggcaagatattgataaacatctgacgcagtgcgccagcgccggcaacgcgggaggcggtcacatagtcgcgattgacctccaccagcaccgccgcgcgagtcagacgcacatagtgcggcagtgccacaaaagtcagcgccagagaggcattcacgattgacggcccaaataccgccaccagcaccaaagccagcaacaggctcggcagtgccagcatgatatcgacgagacgcatgataatggcgtcaactacgccgccaaaatagcccgccaataaacctaaaatcacgcccatcaccagcgatagcgtaacgaccaggcagccaaccaacagggataaacgtgcgccatacatcaggcgggatagcacatcacgccctacgtcatcggtgccaagaatgaatttccaactgcccccttcctgccacaccggcggtttcagcaaagcatcgcgaaactgttctgccggcagatgcggcgccaaccagccagcgccaatcgcgaccaccagcatgataatgatatagaacaggccggcaacggcccctttgttgcgcttgaaatagtgccaaaactcctgcatcggggtcattggcttcggcgcactttttactgctgactcggtaagttgagacattctgcgccccttatttcttatggcgaatacgcgggttaaccacgccgtagagcacatctaccagcaggttaacaacaataatcatggtcgcgaccagcaatacaccgccctgcaccactggataatcgcggcgttgcaatgcatctatcagccaacgccccagccccggccaggagaaaatggtttcggtcagaatcgctccagccagcagagtgccaacctgtaagccaatgacggtgacaaccggcagcaaagcgttacgcagggcatgtaccacaatcacgcgcatccggctcaatcccttggcgcgcgcggtacgaatgtaatcttcccccagcacctccaacatggatgagcgggtcattcgcacaataaccgccaacggaatagtgcccagcacgatggcaggcaggatcatatgcatcacggcgtctttgaaatcgccttcttcaccccaaatcagggtatctatcagcataaaaccggtgagaggatgactgtcgtcgaggaaaatagtatcgctgactcgcccggataccggcgtcagattgagctgcaccgaaaccagcataatcagcatgatgccccaccagaaaatcggcatcgaataacccgtcagggaaatacccacggcggtatgatcgaatatcgaaccccgtttgactgcggccaaaacgccaaccggaatcccgacgctgatggcaaatagcatcgcgcacaaccccagttctagcgtagctttaaagcgcggcacgaattcttcccatacggaaatacggcttttaagggaaatccccaaatcgccgtgcaacacgccgttaacgtaatggaagtattgttgatagagaggcttgtccagccccatttctgccatgatttgcgcatgacgttctgcggatataccgcgctccccagccatgatggtcaccggatcgccggggatcatatggacaaaagcaaaggtcagcaatgttatgccgataaacgttgggatcactaatcccaaacgtcggagtatgaactgaaacatatcccgagctctctgtgtaaagtgcccaacagctcataggccgtcaggcttattaaaaacccggccccggagccatccgcacaggctctgctctcagggatgggtttaaggctcacatctaaaacgatgtcttaactatctggaatgccagacaaacgagggcaccttagcgccctcattcatgaaccgcattgacaggttatttatcgatatccacttgctggaagtagtggccacccaatggatcgacgatgtagttttttacttctttacgcacaggttcgtacacggtggagtgagccacaatcagcgccggagcctgatcgtgcataatcacctgagcctgtttgtacagttcggcacgtttagcctgatcggattcagcacgcgcaggttggattacgtcttcaaacggcttgtaacaccatttggagtagttggaaccttgcttggccgcatcacagctaaacagcgtagcgaagaaattgtccggatccccattgtccccagtccagcccatcatcacggtctgatgttcaccttctttggcgcgcttcagatactcgccccactcgtaggtgacgattttggctttcacaccaactttcgcccaatcagactggatcatctcggccatacgacgagcattcgggttatacgggcgctgtaccggcatcgcccacagatcgatagagaaaccgtctggcaaaccagcttctttcagtaactctttcgctttttctgggtcataggcgtaatctttgatttcatcgttgtagccccacattgttggtgggatcaggtttttagccggctgaccagccccctgataaactgctttgatgatcgcgtccttgttcacggccatagtcagcgcctgacgaaccttgacgttatccagcggttttttctcaacgttaaatgacaggtaacccacgttcaggccagcctgctccatcagattaattgatttgtcttctttcatgcgggcaatgtcagccggattcgggtacggcatgacctgacattcgtttttctgcattttggcgtaacgcacagaggcatctggcgtaatagagaagactaaacgatcgatttttggtttggtgccccaataaccgtcgaaggctttatacaaaatgcgtgagtctttttgatactgctgtagctggaacgggccagtaccgattggattcagatcgactttctccggcgtaccggctttcatcatgttatccgcgtattcggcagacaggattgaagcgaagtccatccccagatcggccaggaaaggcgattccggacgagtcagcacgaagcgaacggtatgatcgtcaactttctcaatgttgctgattaactcacccatccccatcccctggaagtactcatagctgccgccagagactttatggtaaggatggttggcgtctttctgacgcatgaaggtgtagatcacgtcatccgcgttgaaagtgcgggtaggtttaaaatctttgctgccctgccacttcacgtctttacgcagatggaaagtgtaggttttgccgtcttcgctgacttcccatttctcagccagcgctggctgaatttctgttgtaccaatcttgaactcaactaaacggttataaatggcacgagagctggcatcgtaagtagtgccagaggtgaacaactgcgggttaaagccttccggcgagccttctgagcaatacaccagtgtttttgcctgaatcccggcagaaacagccagcgcaaccagcccaataccgaattttactatccctgcctttcccaaggaaatcgtcatcgcttgtgctccattgtggtgatgtgtgttgtgtgtacagccagaccctataattttttagtccgcggtctgtgctgttctggcctgatggccgcaggaatggtggaatgcgatgccgaatagaaacctattcaggcggtcggtttgaagaggttaaaaccccaaaacttctgtcgctaactacccctgagggtaccaatttggcaacagttaacagcaacgtcaatatggctgatggggttttatacagagtatgagaaacagcaagcaaacataaaaaaaactttttattaacataattagcattaaaaattatgctactactaattagtcagtgttatccactgggtaaaattcatactccagtggtaatacccagagataatcagaaaaactttgttgctaaatgatgaaaatctgctcaattatttttgtgatctcacagcaaaacaggatgaaatgctgccttatacccataaataggtgacgactagactcatttcatacatggttcattcatctttaccgactggttcgcgaaaggaataaggtcaggtcaatcaaaagcagatttgagatcgttgggcgtctagccttcgcgcaccaaagcaaagcaccaaaatagtgcgtccgggcaaaccgctttaatcacttcgcattggccgcataaaaatatgtctttgcgccgccataaatcacccggcgcttcaggaaaattaaaatagtcctccatcaagatctgaacgttttcttcacccctaagccgccttggatcagacccgaatcactggtcagcctttcgacgtcctcaaaacgacaaccattacataaaaaccctgacctgttagcgataactacataacacgcgctcttttccccgcgatgcccagctcgccgtctctctaactccttttcattaataataatcttggcttgatcgcccgttaaataagggtttccaatgggagaggtagccagaatattgttaatatattatctgatcatgctttttacgatccttcacttcagatttagtcaatttattgtatgaaacgccatctttactcggagtctgaatatttattatcgtacttaatcctccctgaaaatatctatcctgacatttacatttttttcttttctcgctgatattaatccagctatttggctctcagccgcttttttatcgaccacgatttcagctcaaacatttgacaagaataaaagaaagaatattggtgtataaatatctatggcgttgaatggcatgttgaaataagcattgaaacattgagcgcgctcgttcgccctccttaactatcaacaaagtcaagtgacaacagaggtccggcgtctggcaggtgagagtcaacggttgatggaatgcgggtctataactgaactcttggtttgctggtataaaaggtttactcgctgagcctgagagctaagagctaagagctaagagctaagagctaagagctaagagctaagagctaagagctaagagctaagagctaaacaatgttcacgggttcttgtgtaaatgctaatgtatagttaaacatcgcaagcaaagtgagccactctatttcttgctggtagctgatattgccgtccaattgccaatcacccaaccggcggccaagattacaaccccaaactccatcggctcaaacgtcgtctctgtattacgatccccgtatcattgagaaaaaaatgacataacactttgtatgagaaccgagtaaaaccttttctctattattatcctcaaattgcctatcaagtatatattcatccaataacattagatgattccaaatttataattacggattaacatcaaatataatatccaagataaataaaaatcctatcgagataaatttatgccatcgagtattaaatatttttatttatagtaataatactatatctcagtcctgacaatgggatgtatatcattaaaatcaatgataataaatagaggtttttatttatactgaaaatattcacaccgtaaaaaaacctttcatataatatttattaatgcctgatgcattaccaataaaaattaaaacttatccgatagattgattggttaccttccactgaagtcagcgagttaatagccaaaagatcccgcgggaacagacagaagatttattgtaggaaaaggttggagtcttggagtcttggagtcttggaatcttggagtcttggagtcttggagtcttggagtcttggagtcttggagtcttggaatcttggaatcttgagaatattgaggtctataaacgaaaaaaccccggccaaaaagccagggttcttaaatgtggtcggcgagagaggattcgaacctccgacccactggtcccaaaccagttgcgctaccaagctgcgctactcgccgaatcggggcgcatcttactgctacgctcctggggcgtcaatcactttttaacaaccctgcgccgagtgttgataaaatcaccggcgctgactaaaaagtgacttacctcccccttttctacctctttgatcaggcgttggcttcaacctgacgcggtgactgcgcgcgtaggaatggcaacaggaacaacgcggacatacaggcagcaatagagataaccacgaagaagccgttccagtgccacacttccatgatgcgtgcaatcgggtagccagataatgcggcccccagataggcaaacagaccaacaaacccggtagccgcaccggcagcgtctttatgggagcattctgccgccgccataccgattagcatctgtggcccgaaaatgaagaaaccaatcgcgaagaagcaacctgcctgaagtacatagctgatgcccggcataatccacagggacgccacggacaggaagataccgatagagaaaatcaggttcattggcccacggttaccgcggaaccatttatcagaaccccaaccggcgaccagagaaccgataaaaccgccgacttcaaacaatgaaattgccgagtttgcggtcatcagggaataacctttttcctgagtcagatacaggttaccccagtcattaatcgcggtacgcacgatataaaccagcacataagataccgccagcagccagatgtatttgttcgtcaatacatagcgtttcacgatttctttgttggtcagacccagaccttcagattcctgtaccagttccatggcgtcattacgccatttaccaacgctcggcagccccatggtgcttggcttatcacgcagacgccagcacatcagcaaaccaatcacgacgccaataatgccaggaatgatcatgccgtaacgccaactgaaatgcagagaaataccgcccaccagcagtgggattaaagcaccaccaaagttatgagaagtattccagatcgcccaccagccgccgcgctcagagcgggagtaccagctagtcagaattttggaacacggcggccagccccagccctgaaagaaggcgtttaaaatccatagcgcgccaaatagcagcagggaagaactcataccaaatagaatattaattatccccgtcataatcaggccgatacccataaagtagcgcgggttggaacggtcactgatcatgccggaaataaatttggaacagccgtaggtgatataaaatagcgtgcctaaaatgccgacgtcagacatggtcaggcctaaatcgctgagcattgctggcatgatgaagttgaaacttttgcgggtgaagtaaaaggcggcatagccaatgtacatcgtccacatcaactgaatacgccaatatttgtaggtcgcatcaatttctttttgatccgttaccggcggcacgttatcgcggcttttaaagaaagaccacatgttgaacctcagacattaataaaagtgtggtcatcatggcgcgcgcgcgtaggaaagaaacggggtacattcccaccggcaccgagagtatttcctagttttgcttagttagcgaaggaactgtgggcaggatcacactcaaacaggtaccgttatccacctgaaatttgaagtgcccgcccagcgcgctaacccgctcctgcatcccacgtaaaccgtagccaggcgtgaacttctccagattcaccccttttccgttatcgcgaatagtcagatgcacctgctgcttaacctgccgggcatcgacctcgatgcgactggcttcgccgtggcgataagcgttcgtcacgccttcctgacagatgcgatacaaggtgattttcagggtttcatccaattgcccatcgctcagttgccattgcaatacgccaaccacagattcatcctgcggaataagttcgcgcatcagcgccgccaccgccgcagaaagcggtaaattgttcagcgctgctggccacagctgcttcagaacatcatgaacgccgtcataaacccgcagcgccagagtctcaatcacgtcagaacaactcactaccggtgcctgatccgtcaagcgccggatgatggtcgcctgagtgcgaatgaccgtaatactttgccctacttcatcgtgcagctcgcgcgcgacttcccgccgggttctttcttcggcaatcactaagtctctggctaatcggcgattttcactcagacgcgcagaaagttgctgattcagttcccgctgacgttgaatgcccgcccccaacaataagccagtcagactttgtgccaacagagaaagcaataaatcccgatgagaatcaagctgggcgggttcattaaccatcagcgcgacaccgtttagcaaggtcgccactaatgccccctgccagccatagcgataggacataaacacaatggggatagccagacaaaatggtgcaaaacgccttaattccgcttcgctaacctgatgttgcagccagatactcagagcaaacagcagcaaataccacaccagatggcgcaaacgcaggttaataggcttgtgaatcagccccggctccagcggcagccagatttgtcgcgccagatagtgccacagcaacaggcaggtgggcgctatggtaaatcctcccgccagccccaaaagtagcgccatcgcgccctgcgcggtggaaagctgccatatcaatgcctgaatcaatgcggcgatagcaaccaccgaaccttgcatcaacggccactgccactcgctatcgctctgctggtgccgcaatagccaaggggaggcaaacactgccagcaacgtggtaaacagcaatacgggtaaggcagtccacagtaatatcaggctatcgaattgatctgccagcaaccataacagcaaagtgtcggccaataagattcccggccagtaaccgcgcgggctttgcagtaaaatgcctaaacgcagcccgaaggggaagagcaataatgcctgtaatggctgttcgaccagcagcgtcccaatgctccacagacaaaatgcagcggtgaaatagataaaaaacaacgctaacagcgtaatcaggcgctgcatcataaattcaaaactcgcttcgctaattcaacgttattactgacacctaatttggcgaacagattagcccgatgcacatgtacggttttaggggataaacccaaagattcggcaatttccctcacttccatcccctgagccagtaaaatagccacttctcgttcacggcgtgtcagcggatcgaccgcgacttgcaccagccgctgggcaatttccggcatcagataaacgccaccgccgcccacggtgcgtaccgccgtaatcaggtcatccggcttgcagcgcttggacaaaaagcccttggcaccgcgttctagcgccatttcaactagcgccggactgtcgtgcatcgacagcatgatcacgccgataccggagggaatgtctttcaacaaatccaaaccgctttgatctggcatggaaatatcacaaatacaaatatgcggattcagccccggcaaacctgcgcgcgcctgctctgccgaactaaattccccaaccacctggatgtcgtcctccatggataacagctgcacaaagcccgatcgcacaatgtcatgatcgtcaataaacgccacgcgataagtcatggaggtctccagttactggggggaaatatggcgaggagtatacaacaagcgatgctcaactgcggaaggaaacaggattaacgccggatagcataactagccggcgtggatgattaattagcgcgacgaattttcttctctggcgcatgacaccagttatttttctgcgcaattcccccgtctggcgaggtataacccagacaacccaatatggaatcaaacagctcttcatgacgatgttgggttcccaggcgttgttgggcctgtaaattctcaaacgcattttggtgctgcggttccgccaggaatttatcggaagcccacaccaacagaggaacacggaattgctctacaggagccatttcacgaggagtaccgtggaaatgagcgttggcggcaatggattcgccatgatcggcggcgtaaaataccaacgcttttttatctcttacctgatcgataacgttagcaatgaaagtatccgtatataacacgctattatcaaaggcattgaccaattgctgacgagtacaggaatcgtctacgcccatacattccggcgtgtagcgagcgtaactgcggggataacgttgagaatataaataatgagaacctttggtatgtaataccaccagatgctttccatccggatagcggcccagtgactctttcagttcatctactaacaacatgtcatccaccggtttgccgtcgttgcgtttctcagaggcaatgatttcacggaatgagtaattatccgcattggcattattgtagaaccacacttcgctttgcatcgcgaacagttcagagctgaagcccagtgatttcagcacggagaaaatattctgttccttcaaagtacgctgcgggttatctgccgccccgccttcccgaacaaacatgcagcgcagagaaagttttgtcgaggtatcgcaagacgtccccttgaaagccaccaaattcttttctttactcaggcgcggcgtggtatcacgcggatagcccaaaattcccatatgatcccagcgggtcgtttcgccaataataaagacgacataggtttgatcgatatctgcgggggcaacataggtaaattctttggtgggatcgagtaacgtagctgcatcgtggctttcgtcatattgggtgtaagcatataaacccaaggcagccagccagttagacggtaagtaagagtgagccaccacgccgccataactcggtaaatctaccgtctttagctgttcatccagtttttgcgccttatccagatagcgtaaaggcaaccaaaccaaagccaccacggcgaccagtaataacaatggcttaatacgctgacccggcgtgcgacactgctctagcaacgttaatcgcaaagcgttcttccaaatcagcagcaacggtaagacgctgaccaacgccatccatagaacgaaatgcagaccaatgacttctttcgagaggtcgatatccgtcgtcatcaccgacaccacgatgccgtaaccaatcactacgttgaagaacgtcatgtaatagctggcagcaacggaaatcagcactaacaggctggcagtaatgcggtaaaacaaacggccacccagcgaaatcaggcgcatcacaaagaaggtaaacagaataatagccaccacctcagtgacggcggaaagcacctttatgccttgaataccctgggaaaatgagtcgaatctacggtaaaagaccgaaatattcaggaaaataccaatatagatagccaacaacaaagacatgttttgctgcgataaagacttaactctgtccataaaaaatgggatcccgggggcaaactatttacaacttgaatgtatcagacagtaatcatcactgctggttccgtttacaggtgataagcacgctattgatttcaccagcaataaatatcttatggattatcacgcgagcagacatgcgccggaacaaagttatggcgagaaaatcaggaaaaaaacagaggaatggcgagagaaaggtaaataaaagaggggaatagataaatcatccataaaggacatttcgccctttatggatgcataaaatccagacgagcctattacttcaggttcagcgtcacgtcgatattgccgcgagtggcattagagtaagggcacacaatgtgggcttttttcaccaactcttccgctacgctgcgctcaacgcccggcaggctgatatccagctggacttcaatgccgaaaccagtaggaatagcgccaataccgacggttccttcgatttgcgcatcatcaggaattttcactttatcctgagcggcgacaaacttcagcgcgccaaggaagcaagcagaatagccagcagcaaacagttgctctgggttggtgactgcgccgccagcgccgcccatttcctttggcacacccagtttaacatccagtacgccgtcagaagaggtcgcacggccgtcacggccaccggtagctttggctttcgcacgataaacaactttctcaatagacataatattttcctttttaggtaatcattggcctagtttatgtttcaagaaataacatttaaataagttactattaaatcgcacactatttaaatggttttacaataataagtgtagaacagattggagccatgtcattgtggctctcatctatggaaatcagatttcctgcaacaacttctctcgcaatgattcaagctgttgttttatatctactaatttatcaaaatcacagtctgcagcgcacatcaccgcttctggaataccctgagcctgctcgcgcaacgcacgaccttgctcggtcaaacggatgatcacctgccgctcatcattggatgcgcgggtgcggatcagcagttctgcgttttccatacgttttaacaatggcgtgagagtcgcggaatccaaaaacagccgttgtccaatatccgataccgtcacttcatccctttcccacagcaccagcatcaccaaatattgcggataggtcagacccagcttccccaacagcttacgataaactttatgcaacgccagattggcggaatacagtgcaaagcacatttgctggtcaagcagtaacggattcttcaacgtcaggcgtccaattcaaaaactatggattcaatatatatagtgtgcgatgtaatcgcaagcaatttcagctcaaataaaaagcccccagtaaatggaggctttctgcgcttactttacttagttacttagctggcgcgtctattttggcatcaatgcgttgcagcatatacggatagaacggatttgatgaaatacgcatcagagaatctaatcccactaccagcaccgctcgctccccgcgcgcagcaaaggtgcccaagctgataccgtactgatcccgaggttccggatagcggccatacagcgaatcgctcattgggaaaggcaaagccacgtgagacagcgagaaaatgtccggtggataaatcaatccggtcggtactgacgtttccgtggtttcaccggccagagtggttatggccaaagtgtcgttactttccggtgacacattggtaattaccgtggtgttgtagttacgcggcggcggcggcaacaaacgagccaacgcggtataagacgacgtgcgtaataacgggccaaagctagcggcgcggtttaaatcaaacagcaccacttcactgccattttttggcaggtgattgtacaacgcggtaaccacagcgcgggtactaacggtggaatccatcagcgactggaaggtcagaatgggcggcagactttccagtttgttatctcgcgcatcgcgggaaatctgctgttgcagcgccgccgtcaacaggtaggattgtcgagccgcatttaccgggaacgaattgtatttaaacgggttaaactccggcactatgcccaaccaggacgcttttgcaaacgcggggaaaatagcgggccagccagcgataccggcaaaacgggcaaaactggtgacgccaatcatcggtgaaatcaggatcactcgctcaggtttcgctaactgcggatcttccagagaatccaacgcatacttcatcgccagcgcgccgccgttggaaaagcccacaacatgcagcggcaactcttttccgctcaatatcttggcttcacgaaccgccaaacgggtagcggccatccaatcctgccaatccacatccgtcaacgccgcaggtacagaaccatgagccggcaaacgaataccgacagccacgtagcctcgttgacgataattttcggcaatatgacgtaggctgtatggcgtatcggttaaaccgtgtaataaaaccaccgcccctttcggcgtgccttccggattcaatatataagaacggttccagtcattggcaaaatgcggggaataaatagggctaccggaatagtaacggtttaacggcacctcaactctgggttccagcttgtccgtcacattagctttaacttcggcaaaaacattgtcttccgctttcagataatccgcccagttggctttatctatttctcccgcccgcatttcatggggaacaaaggtatgccaaagctcaagtttagggcctctttgcgtatcgtaaattcgcacggccaatagggtaacggcaatcaccaccactaccagtacaattcgtttaatccaccgcgtaatagctctggtaggcatgcgtcgctactcccgacctgtattaggaatcaatataacattgagtttatcaccattcggcaatcccagtatcttaaccggatttcattcggctagaatagaagttaacgttgaataaataagcaattggttaattaaacgactaaaacaacctgcgctattttccactaaggtaaataaagaccctagttaaaattgaatctcacaaattcactatatggataaaacatatgaatagccctcaaactgagccaacgaccaaatcaggtagcggctcgcgtcgtgattatcttcgcttccatcacactcacgagcatctgtccggcccctttggcaacggctggtttgcgctaaaagcagaggctttcgcccgattttttggcactccgctttttctgggagcacaaacgctgattgttgttctgtggatcggtgccaacgttatgggtttcgccaaatttgatatctatccctttatcttgctgaatctggcgttcagcttacaggccgcctacgctgcgccgctgatcctgttggctcaaactcgtcaggctgaacgtgataaagccaatgccgaagctgacgcacagcaccgggaggcgctggctatcgccaatgaggaacgacagaaaatggccgcgaccatggccgaacaaatgctggaattattgcgccaaaataccgaattgacgaagttaacacatcagctggcagcgaaaattaatgcgtcaacggcggggaaatcaaaagagagttaaaacgaaagtgaagtagtgaagtagtgaagtagtgaagtagtgaagtagtgaagtagtgaagtagtgaagtaaaacaggctgcatcaagcagcccgttcattcctttcctcaacgtagtttaagactcgctacgctctgtcaggtcaaccggtgttgccgacgcttttcgcgcccaaatccaccatgccagcgtcattaatataatccagcctaatcctacatacatcgcaatccgagtatccgggaaatagcccaacaccataataataaagcccataaacagaatggccagcattggtgctaccggccagaatggcaccgggaatgccagacgagaggcactttccttactcatggagcggcgcatggctacctgcgaaatcaggatcatcagccatacccacacggtggcaaaagtggcgatagaggcaataatcaggaatacattcttcggaatcagatagttaagaaccacaccgcacagcaaagccactgacatcactaaaatcgtcatccagggcacgccattacgcgtcaggcggctaaaacatttaggtgccaatccttcctgagacataccaaacatcatacgccccgcgccgtaaatatcgctgttgatcgcggatattgcggcagtgatcaccaccaaattaaggatatttgccgcagaactgattcccagactgctgaaaatctcaacaaaagggctcccattctgcccaatgctattccacggataaatcgccatcagcactaataacgtcagaacgtaaaacagcaaaatgcgcaccggcaccgtgttgatggccttcggaagcactttttccggattcttcgcttcgctggcggtaaccccaatgatctcaataccaccaaaggcaaacatcacgacggcaaatgaagctatcacgccactgatgccattcggcataaaaccctgatgcgaccacaaattacttaagccagtgctttcatgcccggcaccaaagccaaacatcataatgcccaaacctgcggcgatcatggcgataattgcggtgactttcagcaatgaaagccaaaattccatttcgccaaatactttaacactgcacaaattcagcgcgccgataaagaagataatgctgagcacccacacccactgcggcgcgtctgggaaccataaccccatatagataccgaacgcggtaacgtcggccagcgccacgatgaccatctcaaaagtataggtccagccggtcagaaagcctgctaacggcccgaggtagcgaccggcataatgaccaaaagaacctgccaccggatcgtgcaccgccatttcacccaacgctcgcatcaccatgaaaacggctgcgccaccaattaagtaagccagtaacaccgccgggccagccagacgaatcgcctcagccgaaccataaaacagcccggtaccaatggccgaacctaacgccataaagcgaatatgccgcgcgctaagaccgcgtttgagcgtggatgaatcatttttcatggtgcattctcgcaatgtttaagccctttcaggcaggggttcagagagggtgataccagtatttggaatcacccataagatctgtttttattattttatgaaaggcttggaagcaatccggcaggcatcaacgcatttaaatggcgctgagacagcagttgactggcggcttcaatgtcgggagcgaagaagcgatctttatcataataggccacctgttctcggagcaaatggcgcgcagattccagcgtatcagacgtttttaagcccttacgtagatccagcccctgacaggccgccagccactcaaccgccagaatcccgcgcacattttcggccatttcccacaggcgcttaccggctctcggtgccatagaaacgtggtcttcctgattcgcagaggtcgggatgctatccacgcttgatggaaaagccagccctttattctcactggtcagcgccgcggcggtcacctgtgcaatcataaagccggagttaacgccgccgttatccaccaggaacggcggtaactgggacatatgtttatccatcattaacgagatacgacgctcagacaaagaacctatctcggccagcgccagcgccaaattatctgccgccatcgccaccggttccgcatggaagttaccgccagatagcacgtcgccctgttcggcaaagaccaatgggttatcagacactgcgttcgattcaatcgccagaacttcggcagcctgacgcatttgggtcagacacgcgcccataacctgcggctgacagcgcagagaatacgggtcctgcactttttcgcagtttctatgggaatcagaaacctggctctttgtgccgagcaagtgacggtaagcatgggcggcgtcaatttgccctctctgaccacgtacctcatgaatgcgagcatcgaacggactacgcgaacccaacgccgcttcaaccgtcagaccgccacataccgtcgcggccgcatacaaatcttccgtttcaaacaagccgcgcagcgcataagcggtagaaacctgagtcccattgagcagcgccagcccttctttcgccgccaacgtcagcggcttaagaccggcttttgccagcgcatcggtggctgacaaccacgccccctgatgacgagccttgccttcacccaacaacagcaaactcatatgcgccagaggtgccaaatcgcctgaagcgccgacggaaccttttaacggaatatgggggtaaacctcggcattaatcatcgcaataagcgcctgaatcacttccagacgaataccggaaaaaccgcgagccagactatttactttcaaaaccataatcaggcgcacgatagcgtcatcattggcttcaccgacgccagccgcgtgagagagtacgattgagcgctgtaagttttccaaatcttccgtcgcaatacgggttgaagctagcaatccaaaaccggtgttaataccataagcggtgcgtttctcggccaaaatggcctgcacgcaatccacacttttctgaattggcccataggattcatcatccaggatgatgcgtaccggctgctgataaatatggcgcagatcggccagcgtcaactgacccggacgcagtgtcagagttttcatgcttttttcccttgagtggcggcaaccatcggcaagttaagcccttgttgttgcgcgcaattgatcgcaatctcgtatcccgcatcggcatgacgcatcacgccggtggccggatcgttatgaagaactctggcaatacgttctgcggcctcatcgcttccgtcgcatacaacgaccatgccggaatgctgtgagaagcccatgcctacgccgccgccgtgatgcagagaaacccaggtcgcgccgctggcggtgttgagtaatgcgttaagcaacggccagtcagaaactgcatcggagccgtcctgcatcgcttcagtttcccggttcgggctggcgaccgagccggaatccagatgatcgcggccaataacgataggggcagacagctcgccactgcgaaccatctcattgaaagccaggcctaattttgcccgctgacctaaaccgacccagcaaatacgcgccggtaatccttgaaaactaatacgttcgcgcgccatatccagccaacgatgcaaatgctcatcatctggaatcagctcttttactttggcatcagttttataaatatcttccgcctctccagagagcgcagcccagcggaatggtccaataccgcgacagaataatggacgaatataggcaggaacaaagccagggaaatcaaaagcattactgacacccatgtctttggccatttggcgtatattgttgccgtaatcgaaagtcgggatacccattttttggaaagccagcatggcttcaacatgctcggccatagaggttttagccgcgttgacgactaaagttggttcgctttgcgcgcgctgacggtactcttcccagccccaacctttcggcaaataaccattaagagggtcatgggcgctagtttggtcagtcaccatatccgggcgaacgccacggcgtaccaattccggcagaatttcggcggcgttaccgcacaaagcaatagaaacggcttcgccagcagcggtatattttttgattcgcgctaacgcatcgtctaaatccgttgcttgctcatccacatagcgcgtttttaaacgaaaatcgatgcggctttgctggcactcgatattcaacgagcaagcgcccgccagagtggccgccagaggctgcgcgccgcccatcccgcctaaaccggcggtgagaacccagcgcccttttaggctaccgttaaaatgttggcggcctgcttccacaaatgtctcataggtgccctgtacgatgccttgactaccgatatagatccaactgcctgcggtcatctgaccgtacattgccagccctttcgcatccagttcgttaaagtgctcccaattggcccaatgtggcaccagattggaattggcgatcagcactcgtggcgcgttgctgtgagttttaaacacaccaacgggcttaccggactgaatcaacagcgtttcgtcatcattaagctgtttcaggctttcaacaattttgtcgtaacattcccagttacgagccgctcggccaattccgccataaaccactaattccttaggattttcagccacctcaggatccaggttgttcattagcatgcgcagtggcgcttcggtaaaccagcttttggcattcagttgcgtaccacgcggggcgcgaatttcactatcacgaaatctgttttcagcagtcacggcaatttccttcaacagggtttctgagtgccaataggcactgctcgctttggatgtttattaacatatactcgtatagacaagtataagcaagctaaggaataacaactgacttttgaagataaatgacggtgtgaaattacaaaaacactttataatcaattagttatatttgtatcaaaattgatatatatcggttcaaaagaatattagacgtgatatcactaacaaaaccagcataaaattggtctatttttgcgcacaaaatcacatatatttcacatttggttcacataaatcactataacatttaacgcaaatgataattattcacgttaaatggccatcccatcgacaagctatttaacataatattattggcagtgaacaaccttcggcggtaattggaatgaccatgatgccatcgattgttgcggatttatgtccaaagaatggcgctggcgaagaccatccgaatcggccttcaaagccttatcttgctggcttttcggccagggctgctgcatattttttctagcaacattggctgtggtattttctctttgcgacaaggttccgagcaatccgagaaaacccggcgttaaagcggcagatttcccctgatagtggttaatctgtggccctttctcactcatgctcaaaatcgcctgagccggaccagctaaaaagtctgatacatactgccacgccagcgcctgccgctcatcgtagctcagccctttcccattctggttcattggctccaatacctgatcctcccactgtttctgaacccagcatccagtacagcgaatagcatgagctaatagaaaatcaccgtcgctttgatacagcttccacaccgccattattcccaaatcctgcgcatgattaccggctcctttttgcagttcgacataacgttgaaacagccgttgcagcggattactcgtcgtttcctcctgttgctggaacaacccttcggtcaaattacggctatcctgcgcagtcttgatactttcttcaaccgcaaaacttaatgcctctcgccaagcctgccatgcgcggagcgacactttggttgaagccgctgccgaccgaggctccggcatcagccaccgctcgatacgctgctgccattgttgctttattttgtgcagatatcccatgttcggtgatcgcgtagtatattgatcgagaatgattaaacgccggtgttcttgtaaccaaggctggctctgcgcttcggaaatatcagataattgcagattcatttgtctggcaaattccatcgacggactactaccctgcctgatacttaacaaacgatcctgccactcctgcgcgctcaatggcggaaaatcctcattaaccacgttaaatagaagctctagccagttttcctgccgaatagatggccattgctggcgaaaagcggtaaacgttgtcagtgcaatatcatcgccaaccgcctgttcaacggtttccagccaatcatttacctgctgtacgcggactaacgtccaaagatcgggaaaatcgtccatagacaaagaatggagccagatgttaactgcaggctttaccgaagcattagatgcactggccagcaaccagcgccattggggatcgctttctactaaccgagccaataattgccgtagctgagttaactcgcttttttccggttgtaatcgccattgcgcacgctgcaaagctaattggatgtaaggtaataaaataggagcggcaacatcagaaactggttttttgacataacgtagccgttcaaaagaatcgacaagataatcgtgctcgaaaaggctttgtttaaccaaaatatactgagccaacgccagtatcatttcacgctgccgtattggtgcttcagtgcggaagcggtcataatagcggcgaaattcctctgtgatatttcccaaatcagcaggagcgctttccaatagcgctttttcaatagttcgatgctgccatttcaatatggggataaaagggagataactcagcggcgaatcttgccagcgctcgttgatctgtaattgagtaaccaacgcatttggatcgagactttttattttaaaagtgattaatgcccagctccgccatccccagagaaccattaatccgaatagcatgactaataatcctattctggcctttttatggcaaaatccccgccatagcgtaataaagatacgcaaagctaaagaccgctgagcccacattcccgccccgtggaggagcgttactttcttaatcataggtcgagcctgtaagcatcaaaaaaactcaatccacgaaataacagagaaaaaaaggagtacaataatagatgctgaccatctcctattaataactcgatttaatatcaacttaattattgattttttcctggaacacatcagtttatggctaatatcaactaatttgagataacaatactcaggcaagcatttttcttcattggcaatagttttatccaggaaaatatcgttgtccttgttatatttcccatgaaatcctagccgcaggcaaagtaaatagaccattcgaagctcattttcatttttatcaattttttctagctggttgaaaaaaacatccccaccggtagtggtctgaaataattgtgtttgcagcaaaatatctttccattgcttagcataagagagcgaggaggataaaataaactcatcaaaccaaaccatgacagccaataatgcccgatcgcattcagaatcactatagccctgcgactccgcggctttcgccgccctttcaaaaacctctgtggttttttcacgaacatactgataattatggttaaaatcaggctgtttttccagaatcaaagcgaaacgaaaaacatctacataacagtcaattaatgtcttcataatgccaccgagcacataatctcattttcctgagttaatagtgcgcttaacaaataaggtataatccactgcctgttaaaatacatgttaatccactccctgcttatccttgatttatcctgctgaaagcagccatagccaaatatctcataacgcaacgggacttatctgatagattcacaaataatattaaaagagtacatcattgctagatattcgacagattaattatcattaaaatacatgtaaaaacattaaggaccgatttaatacttaattatttaacaaactgagccgtagcataaaaaactcattactcattatgaaggtatggcaacgtaactcttacaaaaaaaggttatttaattcattaagcgtgccacttttaattattatatagaacaataatttaatttctttctaaccgctaaacctccaatttatagctgaatcctacttaccggattagacagcgacccgaattgctcctgccagaagaaaacagagaatgtgttttggacgatttttttggatgggtatttgtaactaaaaaatcaccatgaaattctatacacatttgtggcagatttaaggggggcgcggaacatcacagacgtgaagtgacagtatcataatgatatatgatggttttctagactgttttggaggtaacgggagaaattgtggcgatggcgggaatgtaggtgtagcgagcgctacgagaatacgctgggtacatgacgggccaatccatattggttaacagacggtcacggcgaatggtattcaccgcaccaaagcggaatcgagctgggtcatatttcttatccttcagtgaattacctaacaagctcaaggcgcagtaatgcgcgtatcgtctagaattactgcagtaatatgtgtatgaaatttgattgaatgccaaaaaaacgtcttttcattgaggagattagcctaggcagttgtataagtggcttcacttctctcatgattcagtgaaccaacttgtttcctacctcaatatagtgattgatttgcttagccaacatcccccaaggaacgaaacatgttacgaggttctgaaaaaaagaagcgctgaaaagtttagatcgcgtacgccagtactacgaatcacaagttgaagccacccaaacagaggttaacaatctcaatctgctacgtcagaaatgcagcaagaccttaatggctcatattaaaatctgtgttaacgatctgacaaatatgccaaaaacattccacaagtcatggaatgaattcaaataggcaatctctatattcgacaatactgaggaaaaaatcgaaaccgaatatcgtaacacccatattgaaccagaaagagttagatattaatatttgaactcatcatgcaccagccttcaaagactctattctattaattagtaattcaatatcatcatagatgaatttagaatagaatatccttctgggataattcttcaattctgcatgagccacgttctcaactggagatgatatttgccacaagatattaccctcaccagactcatccctgaaagaaaaaacagtgaaatcatcaagaaaagtaccaaaacttacagagtagcttctcgctaaatcacttaaatcgttcttttcatcgtcataaaaatcatcatcggatatacacaacgcttcatttaacttacaaaatatcgcctcttgagattcaccccccaaaataggttgtaacctttcctttttcattatatccataagaccgccaaccaagtaaccatcaagatatattaactctgacaatgcgcctaaactattaccctcaaaccataatctggcataccccataaataattttgaatcagaaatgtcatattcaattccaacagtcgattttgttcctatcatattaggcatactcaacatcccttcatatttcttgcgtacttaggtacgtttttcttatctatggcacgagggtttccgcgtatatctacaccatcggttgaaccattccaatggaaggcacctgaaccatcagcagcactactttggaacctatgccaattagctttcttcccctcacctacttttgtccaacttgttttaggatcattaggatctagctggctttgtctaaacagctcctcatgattcgaaggcaatacacttttcgatgaattttgcccagaataaacgggacggctacagcgatggtcagccggtggatattccgcatgggcgatgggtggatttgcggttggagatgccagtgggtgaaatcgagggttcagaataggctcatatgatacgtaaagggcaacttcagcaccctgccggagagcatctatcaccggcagaacaattttatttgttggccgcctaaaaaacaggcaacacaatttttgccgacacagcaatgttaatgcgacacaaccttttcattgtcagttaatgtgagctcaaatttgcgctgattgcgagcccgaccgttttcgattgcaagccgttacacctaagcatgattcttggcttcttatcccacccccaaaactcgctagtcgccattgaataaaccaatatattttagcccattatactgatctttaattggtcgttttatcactaagttgggatcttgataccaaaatattgcattagcttttttaatacccaaattatcacattcactttttactaatgataattcatcctgatcaacagcagcatcgagtagtatctcatctaaagacacttcttgcttatgtctaggtatcatgccaatgaagtcatcatcataccattggatgccgatgtctttgcaaaacgcacactgcctataattagggttattaaagtctccctcaacagaataatccaactcaaagtattccatgtattcctcttctgaggagaaattagttccaatccaaacgtgtactttattttccatatttaacacctgcttagtttcatgtgacctttatgatgtctagctattatcttcttagcatcagctttagacgttgcaccttctaaatcagcaattaacttattatggaaatgtctaccagaccggctaccatggtgccctccatccggcacaggaagtcctttagaatcagttacattagtgaatgtgattctatccgtgtttacagcgtatttttttaactcctcagcgctaaaacctaactctttggctttagctgctaacgaaacagggaataattcatgttttccgccgcttccccttaaggccgatgatactgacgctttattgtctataacatcttgaactgaatcagcattaaaccattcgttaaacttaccgaatccccaaggagtcaaccccgcggatccgttcaagttaacagagcattcacatacttataaattcatttcgtccgcgaacaagataatgattcgggcgaagcagagggaatagaagaccgctgttcgagatgcgaactaatgtcaatatcaccatgatttcatatcatttatagagctaacttctaaaaattcgataccataattcaatgcgcaattctttaaagaagatactagttctctatcaaacaatataaaactgtcccctgcttctggcatgtaatggtgatatataaaaaaaccacaaccaaaacttattattttttttataacatcactttcgtatccatgattgttggatagatttgaaatcagaggctttgcaggtggcgggtctaaactaagcgattttctcatttttatttcatttttcttttcaattatttgatatttatctaattccacacttaagtgctcaattttttcattactaccatatagataagcacctttatttttgacatttcccacactaattaatttcacatttgttgaattatctgcatttttatagaaatacatattagggaatgtatcattaatgattttcaaagaagtactagtagtaaatccataaggcccgtagttattgatatcaacatcatattgataacacaagcaataagctattgagtcaagatcagagcttattactctattccaatcaggaaccggaaattttattaatcgctctttgattaccatgtaaatataacctcttcgcctttagtgttaattgaatgaatatgtccggagtcatggtgtttaggtatatttggcatgccagcgtcaggatgtccatcgggatgttcaaaccattggttttttccattaggattccggcgacctaatttttgagcaccatcagctttcatctttccccatttatccccacggctagttggatttaaatcattcaagctaatgtcttgaccgccgcgagaaaccctcggaacttgtgcatgattttgagcttgccttaaagcatcatttcgacttttagcctttatgactctacaacttgccaagccccaagggtcgatccaactcagcggattcggcgcatattgatataaattcagtccgcccagtaacccgatcgggtcaggcgtgataaaccgaccgacttccggtgcataatagcggtaagtattgtagtgtaacccggtttcttcatccagatattgcccggcataacgcagcggctgcctgaactgccccagcggtttgctgaggttgcgccacatcgcctccgtctggcgggtcacctgcccaaacaccccatattgccctgaccacaccatgtcgccctgtttgttggtcacttcctgcggtgagccgttcaggtcggtatgataccaatacaactggtcttcaccgtagcgccgttcaatgcaggccaacggcgtataggcttcgttcgggtcgtaacagtaggtttgttggctgtctgcggtgcggctttgcagcaaccgcagtccttgccacagaaaatgcgtttcgtgccgctcctgccgggtgctcacgctcttgctcaaccggcggcctagcgcatcatagtggtactgcgcctcaaacaatcccttcggcccgtcccccttggcccccaccaaccggttatctccgtcgtagcgataacgctggatacgggcgctgtcctgcctgaccaccatattgccaaaggcatcatactgatattgccactgctcccagcgggtgaggcggttatcacggtaaggctcgctgccaccggtatggggtgaactctctggcgtctgtagcggcactatcagcgcattgtcggcccggtcataacgcaccgaggcttgcccactgtgtgccgagtagacgtgacgtagccgtccctcttcatcgtaaccatagctcacggtgccccggttgctgtcttccaccgcagccagttcatgcatatcgtcataatgataagctcgccacagaatcccttgctccggggaagtgagtgcctcggtaatccgatggctgacgctgctctgccactggcgacgccccagacggtcatactgccggtgctgcgtcagggtgccttgcgtgcggctggtttcccggtgcaacgcatcgcgctcaaattcactgactatctggtcattgaagcggatggcggtgacatgcccggagccgtagtggtgccaatggaactggtcgtcatttggcagtcccaacgtggtcaggttgcccaacgcatcgtattggtaggtcagcgcctcgacgccgttatgctccctgacgacccggcccagtttatcccgttcaaaagtgacggtattaggctggatacccagtttttcaccctgttcggtgggggtacggcgggcgctgagcagattgcccatcacgtcccactggtattccacccgttcggtctgtgtctggcgttcaatcacacggcctgcggcatcatagacaagctgactgggtttctcgggccgttggccttcatcgtctgccgtgccgcgttgggtgaccgcgctcatctgcccatcggcatcgtaagtgtagccataacgtgtatcgtccgggcgctgttcttcctgtaagcggccttccgcatcacggctaaagcgatacaccccgccattgtcgttatccagactgagcaaacgcccttcaacatcgtagttgtagcggatagcccggttcaggcggtcggtggtactcagggtttgcccacgtgcgttgtaatgccaatggcgaggcaggttgttccccaactggtggctgagcaacagcccagcttcagaccagccaaactgctcggtggagccatccggcaaggtcagtgtgaccagttggcctacatcgttatattcgtagtgggtttcctgctgcaacgcatcccggcgggaaagcagttgacccaaggtatcgtagcgccaggtcgtcggctggccggaacagtcggtgtaaagggtcatcaaccccagcatgttccagtctaagcggctctccccaccccgcgcatcggtcatgctatccggcaacagcgtgttgtcacgggggtaatgatactgagttgactgtaacaaccgatcggtttcctgtactacccgtccttgttcatcccattgggtacgttctgacgtgccatccggccagaacacaaaggtctgtcggtcgctgttgcgctgatactgccagcgcgttttcgcaccattggcctcggtgaccgacaccagcctacccagttcatcccactggcactggcgcagatgccccagcggcgagcggtaaccggcgggttgccctacgtcgtcccacaacagatgatgcgtgttgccagagcggtcggtgtaacggctgacacgacggtgttcgtccaacgcccacaccgtctggctgccatcctgccaggtggcaatacgttgacgctgctcttcatcataggccagtcggtagccatcgccttcactggtgtgctgttcaaccacacaccagatgtcgtcaatctcttgccactgatagtcacagcgcaatcccgtggcattctcatgccataacagcaaaccgttatgttcatcccagccaaagcggcgcatcaccgcctcaccccggtgctgtaccgccaccagttgccctttctcgttatactggtaacgggcacgcagcacctcaccagacaccgtgtgctgccagactgccgtcagacgattcagttcgggatggtactcacagcgcagggtttgcccacgggtacaggtgacgctctccatctgccgttgtgcgttgtagtggaatgactgctggttaccgacattatcgctgatgacacctagaggagcacggccctcggcatcaaaggccgggtagtggtaacgcagttcgcccgcatcgtggacagaccaacggccatcctcatgatgcgtgagccagcactgctggtcagggcagaacgtctggtggcctgcgggcacatccgggaagggaatgaagtcgccataggtgttacgccacagaataccgtcttccacctgccgcagttcactctcccagaacaggctccaaccgcgtcccagcacgccctcatagacatggctgctgagatagcgacgctgccagaacaggggtaattcaccgtcgagagtaaaatccagttcgtcgtcatcattgaggaatttctgcccggtcgtcacgtccaccggtttagccagaacgcctgccaccgacgctactattgccaacggggccaaccgacaggcgattttggctatcttgtccgcgcccggcagtttggcaaataacttttgaatcgcgcccggccccttgctggccgcccccccaaagcttatcaggcccgccgcaaacatcgtcaggtcagacacggtgtaggcccattggggaatttcagttgtgatgctttccgtggtggtcgtaccgccaccaataaacacgttgggtgaccccgccatgatggtggcatcacaggtggttttatcgctcttgcgggcggctggcaggccattgataaacacagaggatgagccctgagccacctgctgaaccttgtccttgtcgcagttcaccgtgctgagtgacgaaacagccgccgctttgccattggtaaagacattgcccgagccggtgataatggcaccgctgggactcatcgaaccggctccagcctcaacaccggcatcccgcgctttctcccccagggcgttcgccgccataccgacggcaatcgaggccccaatcagcagaataccgacaccgagacacgcagacgcgcacccggcagcaaacagcatcccgcccagaatgcccccggcaacgttgatgattccgcctaaaatcgttccaccaatcaacccggcgatagcctgagaatggccgatgggatcaccgacgcgtgccgcttccagcatgagtattcgctcctgtccgtgtgcgaaagattaggggtgttggtaactgtttaagcaatcagagaagaaggcttcatcctgttcactcagggcatgagcactggtcagcgtgaaaatcagcacggtggaggccgaaaccaaaaacgccgcctgacgttgatgcagtgtctggcctttttgcggatggtaacggtaaagcagcgtgatgccatggaacaggctatcgcccaagactgcgggctgttcgtcgagagcctggtacttgcgcagacctttttgcaatacctcacgctggcgagcgagataggcttcaaagctttcgtccgggcgtaactggtcacgggaaacattgagtgagggcttttgcggggcaatcaaaatattgacggtctgctcacggtaatcagcaggcaaggcgatactgccttcagtgaacacacagcgtaggtctgacacctgattcatccttgaaatccattcaatatccttatcaatgtcatgtatatttatcatactgcgatggaaaaatcaggaaaatcgataaaaatgcggctggttacatcatgctggctgatgtgtcagtgtcagtacatttctaggattatctgatgagaatgtaagtatcccagctttagttccacacactttttgagatttccggtttctcagccatcagccgatattcttccggcgtcagattattcagggattcatgaggccgctcactgttgtattcattcagccagcgctccgttatttcccgtgcttcattcagtgttctgaacagataaaaatccagtatttcggtccggtacgttcggttaaaccgttcgataaacgcgttctgtgttggtttgccgggcttgataaattccagcatcacgccatggtcttcagcccattgtgccagcgccagtgatatcaattccggcccgttatccatccgcatcttcagcggatagccacggtttgccgctattctgtccagcacccgcacaatgcgctgcgccggaatattcaggtcaatttcgatagccagagcctcgcggttaaaatcatccacgacgttgaaagtccgaaaacgtcggccacatgtcagcgcgtcgtgcataaaatcaatcgaccagctttggttgagggcttccggcgtggccagcggcgccggattacgcaccggcaggcgttgtttccctttacgacgaaaattcagttttagcagacagtaaatccggtgtatgcgtttgtggttccaggcgtatccctgcctgcgaagcacctgaaaaagcttcttaaatccayagcggggatagcgttcagccgcctcagtcagcctctggatcaccggttcatcacgtcgtgtattcggttgataacgaaacaccgtcctgctcagcgataacgtcctgcatgcctggcgtatgctcatcgtaaactgcgtggtcagatagttgacgagctcacgctttatcgctggttttaaagctttttttcgatgacgtctttcagcgcacggcattccagactcaggtcggcaaacatctgcttcagacggcgattctcgtcttctagatctttgatttttttgatatcagcggcttccatcccgccatatttcgccttccaattgtaatagctggcttcggaaatagcagcctcgcggcacacatctttgacggtcctacccgcttcgacggacttcagtacggcgatgatctggtgctcggtaaatcggatcttgcgcataaggatctcctcaggtgacatcatcagtatgtcggaagatctctaaaaatgaatgggccgtttaagcgggatacttacaaacagtttttataaaactattatctttaagaccttatttgaactgatgtagagcgtgtgttgtataggaaatggtacaacgagcatggattgagacgttgtgtgagagcttacaaaatgaccccaccttgactgaaacggagttataactagatgagccaaacaaccccacacccaattacacccgttcttgaaagttttaaagtggcgaaagcgcaacacctgaagaatgaagaaacctacgaagaaattattgcgtccattgcccgcagccagcaaaagcaacgcgacgccgaaaaccagagccaacaggctgacggcagttggcgcaaactgtttcgtagcctgcgtggtgaaatgacggatgagctgcaaaccgagcatatccgccggatttcacagcgggagctggcgcaagaattcgggcatctgattgaagaactggaactggataaagattacacgtcactgcaattatgtgcttctgcaagaccctataaagacacgcataaagtagcgttgatggaatatgcgaagatggaaatgtctgccgcaatgaaaaccctgtcacccgaactcatccgggcagtgaaattaaaggtcgctgtgaacgaactctacacagatacatcatcggagaaggctttgggtacacttacagcgactcttctttcattggcgggactctatacgtttgatatggaaaaagaatcgatattagccgaactcacactacagccaccacaaccgggttatgttgactctgctctgaacaatagtccgataaaatgtgcgcggttatttgaagcaataaaggtaaaacgggaaaaactaaacccagccggggagcaataattatgatgcgttgtcctgtgtgtaaacatgcgtctcatacgcgtgccagccgctatttatctgagcagaccaaagaggcgtattatcagtgtcagaatatagagtgttcttgtacctttaaatcgattgagagtgtggataaaataattacccgccctccgattaaagagcctgaaataataccagaggttattctaccagaacgaaaagtattaaatcgctacggttctaacgcacgaattcattaataatcccgctccgcctgtaacctctcaaggcagggacttttctccgactctcgccactttgcccttgccgtttaagggctttttctctggctagcctgccaaaatgagcactgcatgcatatagtgcatgattttgcatgcaacgcccttgcatcaaaacatctgaaacaccgcgctacaagggcttgtaggctctttatgtcatgcatgaaaagtgcatgataaagtcagagcgcgtaggcgggggaccattgcgcgcggatgtgtttgacacctatttttcaagctcacattacacttcgttgagaattctaaaaggtgttatctcaatcgttgatattgaccaacatattaaataacatactacattttagcatttttgaattgttatacttactcttctaaagcgagtgaaggcagactataaatctgccttctttatgagattaacaagcaatttttaactgagggtaaattacaccgcgaagttcattcggaatagtgtcttttattacttcaattaaactatctctacttgaaaccaaaagtgctaattcatcaagtaaaatgtttaatttactgttacgatcccattgcgttttatagggtgaagaatttatcttttgatcaactatctgcaatcgtctctcattatcatatatgtacctcgttttcacgatgctatgagaatcttcgatagattcctgatacgtgataattagatgaaccattccatttttcttaatagtttcaatgctttcgtattcgttatcaaaaatagcagtaaccaactcttctggctgaactcccttcaccatgcaaaaggctattattttattaataatatcttttattttcaattggttagtcatcttatcatcctctcaacttcttttaaaataccgggcaacgcatctatagactgtagcagagttttattatcacgctcatccacacgcccaaaggcttttgacaattttaaattaatataacgcatcaagataccatcattggcgtccgttggtgctatatactgcatatgacgaccaaaaatatcatatagttctgaactcttctcaccaatacctttatcattcaatagattagcaacttcatcttgggttcttgtcttaaggatttctcgcattctttttcttgcgatatgtggtcgtttttcaattagctcaggatctataatatcagcaactttacgcgcctcctcctctactaatgactttttcaacccttcaattgctgaatcggataatgtaataccagctaatcttattttttctatttggctagaaacagcttcacttatttcagctcttttctgctcaaaaagagcattaaaatcgatatcatctaaatatgaatcggtttcacttacatacgcaccatcactagcaattcccgctagagcttgctctctctcaacataatcacgatcgctaaatatatattctctaacactagctctttttgccctgtccacttccttttggaaagtatcccacattacatttagaccaatttcctcatgaaagataaccaaaccattattatctatttcaaaagcagcaatctcattatctggtatggcccttaatatacgccctacaacctgtgcgaatgcattaagacttctatatggtctaaatattgccaatatacttaaatacttatggtcatacccctccattagcatatttactgatataaccacatcacaattattattgtctatctctttaaacgaggtggcgattctttcaggctccatctcactatgaattatagtagctctcagccctttttctgtataccacttatatagatcttccgcatgagtgatactacaccctacagctaatatcttatgtggcacagaggttgatattttttttagctcatctaaccgacggatgctatgttcaatcacatctttagagcattcctctgataacgctacgctcttttcaatccattctttatctttaagcgcaagaacatcatctttagataacttaacacctggcatatctggcgtataaaagaataactcactagcattaaccgtttctttccttagccatttaacatatttatctttcatgacctcagacaatggcgtttcatgtattttcactccgggaacttcctgattatccccccgataaggcgttcccgtaacatgaagaatcttagcattagaaaaatattgtattgcgtcacgccagctttgtgctggggcatgatgagcctcatctacaataattaaatcaaagtaatcaggagcgactcgattaataagagttgtacttctattaccagaaattctatgaatattagaataaacaatatgactactttctaagtgttcatctgatatatctgaaacatattcatttacaatcggaatatctttactgctaaacataacatcgcaattaacccaaaaattatcttctaacacttcttgggttttcctgatgctgtctttcgtaaccaagccgggtgtaataattaatactcttttctctgacacaccatagggtgcaatcgatatcaacccactttttcctgtacctgtaggcaacacaaccaaggcctcacgattttgcggatcgctaaaaaactccctaatctttatgtatgcttctacctgtggtgttctaagctttttatttccttcaatattcactgctgtgtcaaaaaagtaagacatttatcttttccttgattacaccaaatataatttatatgaataccactgcaacatatctcttcgcttttcaagatactgtgcatgattataagtaccgcgaatactattcttatcaacgtgagccaattgtagctctatccatgcactatcatagccttgctcatgcaaaatcgttgacatggtatgtctaaatccgtgacccgtcgcacggcctttataacccagtaattcaatgacctgattgactgtttctttacttataggctttttacggtcatttcgtccaataaaaatataaggataatgtccggtgataggtaagagctgtttaaatagcgctataacctgcgtagacaacggcacgatatgagggcgacgcatcttcattcgttctgctggaatctcccacaagccgctctcaagatcgatttcctgccaagtagcaaaacgcatttccttagttcgtacacccgttaaaataagtatcttcgcggcgttcttggttatgatgctgccggtataaccctctagatcacgaataaaatatggcatctcttcggcagacaggaacgggtaatgctgtttctttggcgtacttaatgcgctggcaaggtcaggggcgggattatatgcagcccgaccggtaataatggcataacgaaatacttccccgcagcgctgacgtactttgcgcgttttttctaacgctccacgcttttcgatacgttgaagcacatcaagtaactccagcggtgtgatttctgcaattggccgtttaccaatatacggaaatatatccgcctcaaaggtactcatgatttcttccctatatcccaaagaccaacgatccgctttagctttatgccactcacggctaatggcctcaaaagagttttccgatgaaagccgctgcgctaacttctcagcctttttcacctctgcgggatctgttccatctgcaaccagtttacgtgccatatctcgcttagagcgagcttcagcaagggatatcaagtcataagtccctaatgacattaatcgggctttaccggcaaaacgatagcgaaagcgccagcctttgctgccattaggttcaattaagagtgatagcccttgcccgtcactcagggtataggctttttcttgtggtttagcacggcgaatctggatatcggaaagtggcatgtgtatagctcaaaaaggtatagggtaattctataccctttactatacacaattgttacgaatttagagagataagctcggacacctacggacaataaaacgctctatctattggttttactggggtttttaggactttcggggagtaatacggaagagctttggcggaagatcacaggagtcgaacctgccagggaccgctggcggccccatctggatttgaagtccagccgccccaccgggagcgatgatcttccatagataatctttatgtaagctagcgattataacgcgtttattcaacaaggtattagaaatcagtcaggcattttcaacattgttaagttgagcagaaatctgcgtaacccttggtaaaagtgagtttttctccgtatggcaaccatacaaaagcctactgttggcagcctttgcccgtaaaccatggcgacagtctgcccaaatattccccaaatattccccaaattcgctgcaaccttatgaaccagagataatcgcacggcaaattgccccgtggcagctaaagctcaattctggatgagcaccgtaatcattgatataagtgataaccggcgaggggtaattttctgcaaccagttcgctgctggacataggtgcgaccatgattgcaggaaaatcctcttttgccgccgctccgcttctggccgccaagccgattaccgtcagataatagggcgtcggattctcgagccgatatccctgagcagttttgtgcaatatgacgcgctgctgccagatttcatcgggctgcggcacaatactcaacgggcggtaaaacagctttattttggtttgtagcgctacctgtatcgcatcgggaatatcgctacgcggcggtatttctcgcaacgtgtaataaaacagcgattcgcgatcctgaggcaatgttttcgcatccagtgtggcataaatgcggacgatatttttttcacccgaattcaccctctgtatttccggtgaaaccgccaacggcacagaggtgctctgcggagctacattttcgatccacgattgagccagataaggcagagttttattctcattccgaatactcaggttaacgaatccgacatcagccgtataaataactcttgtacgatccagtacgatagcggcattcgccttgtaaccaacgaccatcaaacaggtcaatagcgccattaattgtatttttttcatagcgagcccatccttgcttcaaatcatacataacaggacgctatatcattcctcatatcatcagtaactaatccgccgttcagcatactaattgcagcttatatcagttaatgcatggttattgtcattagcctcgaaataacctgatataaataagtagaaagaggcgaataagttaacgaaagcgaattatttttgatgactggaacgggcctgtgacatgtctaaaaaacagaaattaggcagaaaaaaatatttaaaacaacaaattacctacatcaactcattcagatggcgatttcataatgcggtgaaacccccaaactctttagcccgcagttatctacgggcatagcttgatcaactgactaatcttcttttatcaatacgctgtaatcctatagataacaacatgctaccacccaacgcgaaagcgaaaacatagaaaatatccagcgccggataggcggtaaaatcaaagtggtgggtgcgcacaaagtgaataataagcgcgtggaaaccataaatcgcaagagaatgacccgaaagccaggttaaccaggctcgtggctgggaaaggcagtttttaaaccagattagcagagacaccgccgcaataaagaccagcggactacagtacatgtagaaggtatctgcaaaatttccattgataatactttgtttttttgtcgaaatgacgatcaatcctacgctcacgataaaagcgaacgctgctgcccaacttatcgattttccttccgtattcagcataccaatcgcccggcctagcattgcgtatagcaggtaatagaaagtatctccggagatatacaggtttacaggcagtaaatggaaaccatcgagagagaacttaccggtataaggattggcaaccaccgccagcaacagtatgactacggcaacgtaacggccggatacaggcttgacgttaatcagcggagaaaccagatacaccacgattatggcgtagaaaaaccacaggtgataaaacaccggcttttgcaaaatattctttaatgaagcccagccgcctatcggcgtcagtgtggatatataaattagagcaatagcactataaaaagtcaggcatagaccgatgcgtataaaatgcttcttaccggcacttttttcacccaaaaacagataacccgaaatcataaagaacaaagggacgccaacccgagacatggaattcagtaagttagataaatcccagctgaattcaccgaccgctgctccgctggtgagatagtaagtggtggcgtgaatcataaccaccataatgcaagccactgcccgcaaattatcaatccatccaattttattggtcatgcctattctctgttgctcatgcatttgggccaaaaaagttaacgataagttatatactaagggcgctaaaagtaactcaaaaagaaatactcgcccaaggtaattaagaatctacctgcatgtaaatcgttgccattattcattattggcggcaaaatagccgtcctaactcgtctcgacagcttttctcgctgaggcagttccacttttcttattaattattaataacttaatctatgcaaactacgttaacacccgcgaaacctttaggccgccgggcgctgttgtttcccctgtgtttagtcctatttgaattcgcagcctatattgccaacgatatgattcagcccggtatgctggcagtcgtcgctgatttcaacgccagcatagaatgggttcccacatccatgaccgcctatttagccggcggtatgttcctacaatggctgttggggccgctttccgatcgccgtggccgtcgtccggtaatgctggcaggcgtggctttctttgtcattacctgtctggctattcttttggtcaataccatagaacaatttattgctatgcgcttcctgcaaggcattggcctgtgctttatcggcgccgtaggttacgccaccattcaggaatcattcgaagaagcagtatgtattaagatcaccgcgctgatggcaaacgtggctctgatcgctccgctacttggccctttagccggtgcagccttgattcacgttgcgccgtggcaaagtatgtttgtgctttttgcggttctgggggcaatttcgttcattggcttatggcgagcaatgccagaaactgcggtgttgaaaggtgaaaagctctcgctttcggccatgtggcatgattataagcaagtgctggctaaccgtcgctttctgtgcggagcattggcattaggctttgctagcctgccattgttggcttggattgcacaatcgccggttattttgatcagtggcgagcagctatcgacctttgactatggtttattgcaagtgcctattttcggcgcattaatcattggtaacctgacgctggcgcgtttgagtggtaaaaccagcattcctaaactgattaaactcggcgcaggcccgatgatcggtgggttgatattggccgctgtttcaacgctttattcatctcacgcctatttgtggatgacggcgggtctcagtttgtatgcttttggtattggtgtagcaaatgccggtttggtgcgtttgaccctgtttgccagcgatatcagtaaaggtacggtttctgccgcaatggggatgatcagtatgtttgtcttcactttgggcatagagttggcgaaagtcgcctatctgtggggaaacagcggtatcttcaatcttttcaatttaatcagcggcctgctgtggctgtcgctggtagcaatatttattcgtaaacagcctgaagctgtagctgcggaataataaacctggcactgatgatgtgaacagatgggttcggctaatgctgaacccatttttaatggtcatggaatctataaagcatcggtaggaatgtattcatcacaaaatacatcactattgatgtgtaatctggtagttacatcagcaccgatgcactaacaaaacatacctcggtcgcgcagaatatggtcgttgccacggcggcgggtaaagccgctgcgatcgaaaaattccagaatttgaatcgctaacttacggccgacgccaaggctgtcgcggaaatccgctgcgctggcgctacctttgctggcatccagagtacgaatcaaatcggcaaactgatagattctgcgattcagatagtagcgatccggcacaatcgcggtgatatggcccaaacgcgcggctttacgcaataatccacgcatcgactcttcatccatttccagcgctacggccagatcccgcacccaccaagggtcactttcaaaataaacccgcgcacgcagccactgtttttcctcttcagctgtaaacgccaaactgtgttcaggtaaatgcagccagccgcgcgtattcgctaattcgccgtcggcaactaattgatcgataacccgattaaccaaagcctcatcaagcgtcggtaaagccatgcggcgcaggcgggcgcggcccaagcccaactgatcgctgtgctgctgatggtaactggcgagcacttgcagcaggttttgccgggcattttcagccatcgcagaggaaagtacgctatcgccagccactaactgttggctgtctgccaatagtttatcgagttgtccatcggataattgacgtgcccaggcaaactgttgaatcgataccggccttttatccaattgaaggttaaggacttccgcatctgtcgtggcctgagctagcgcagtcagccacgccaaaaacgccggctgccgcttacctcttttcggggaagacagagcgatgactcgagcgccacccagggtgtgctttgccgcaatgtcacgcaggataaagcgatcgttttctgccagatacagcggtgtatccagcaataattcggccaacatcggggtttctgcgccattcagcatggaaactcgaccggtaatatggctagcaccttgatgtaaatgcagagattgccaatgatgcatcggtgtatccgttgtgacttccaccagcacccgatcctgcgcttccggcggctgtcgctccaatagccaatcgccgcgagaaatttgctgtttgctggtatcgccagtgatattcagcgcaatcctttggccagcctgtgcatgagtggctggctcattctgcgaatgaatacttcgtacccgaaccggacaatcgctgccggttaaccacagagtatcgccaacggctacttgccccgctagcagcgttcccgtcactactaatcccgaacctttcaggctaaaagcccgatcgattgccagacggaaccgccgttgaatacgttgagcatcgctagcctgctggctaagctgcgtcagatgagcgcgcagttcgtcaataccgactccgcggttagcagcggtgataaacagggaaatctgatcggcagcccagccttgctgtgccagttcggtcaaaacctgctggcgaacctgctcaatctgttgctcatcggcacgatcggctttggttaacgccactgtcagttttggatggccactgaggcgtaaaatggccaaatgttcatgtgtttgcgccattacgccatcgtcacaggccactaccagcagagcgtgatcgataccgcccattcctgccagcatattggacagaaacttctcatgaccgggaacatcaataaaaccgagactactgccgtcgggctgtggccaataggcgtagcccagatcgatagtcataccacgctgtttttcttccggcaaacgatcggcatttacgccggttatagcctgtaatagcgtggttttaccgtggtcaacgtgaccggcggtggcaataatcatcaaacaagctccctgagcaaagcatcttcatcatttaaacaacgtaaatctagccacatgcgcccatcccgaagatgaccgatcaccggctgattcagacggcgccagcggttagccagcgacagcagcgtactaccccgcccgtctttaggtgtgaaagttatcgcccaactgggcaaacgatcgaccggcaaggaaccactgccaatctgcgaccagcattcttcgctggcaaggtcaaaatccggataatgcgcgctaagctgcactaataggcgctcggcgctgtcacgcatctcttgctgcggacgagtgagtatgcgcagcgatggcagtaaatctgccaaccgatccggttgttgataaagacgtagtgtagcttctaatgctgatagggtcattttatcgacccgcagagcgcgtttgagcgggtgctgctgaagtttggcgatccagtgctttttgcccagaataatccccgcctgcggccctcccaacaatttatctccggaaaaagtgatcaaatcgacgccagcggcaatcagttgctgcggcattggctcggcaggtaatccgtattgggtcatatcgattagcgaaccgctgcccaaatccgttgccgtcggcacagaaaattcctgccccaaggctgttagctgagattccgttaccgcggcggtaaagccttgaatactataattactggtatgaactttcatcagcagaccggtattttcgccgattgcctgccgataatccttcaaatgagtgcggttggttgcgccaacctcaaccaattggcaacccgcctgacgcatgacgtcaggaatacggaaagcgccgccgatttccaccagctcaccacgtgaaaccacgacttctttgcccgccgagaccgccgccagcatcagcagtaccgccgccgcattattgttaacaatacaggcgtcttctgcgccggtcagttcacagagtaaatccgctaccgcccgatcccgatgcccgcgtccagcgtcaccgaggtcatattccagcgtcaccgcgccgcgcatcgccgccgtcactgcgttaatagcagattcagccaaaggcgcgcggccaagattggtatgcaataccgtaccggtcaggttgaatacgggtttcagggcgggttggcgttggttaatccgttgacgtagttcggtaatccagcagctatgccagtgcggcagcgtctgagtctggcggataatctcgcgggcctgcgtttgcattttccgcaggatatcagtgagtagcgtcgcgccatattcatccagcaaaggagccatttctggctcccgcaacagacggtctatggcaggtaattggctataaagttgctgaggttctgcgctcatagtcactcaaatcagggagataacggaaagttattcgccggggaacaggaacggattaacgctactgcgggcgaaaccttctccttccattttggcatccagaatcagcgaggccaaatcatcagccaccgcttcaacctgcggatctttttcctgatacagaatttttagataagtgccgcaatcaccacaactttctgcttttaccgctgccagttcgctatccagtgaccaataattcagatcgcggctttgctcgcagttactgcattttatccgcacgacgtgccattcgctttcacacagattgcagtgcaggtaacgcaggccgttcaccgtaccgatatgcaccacgctggaaaccggaatactgccgcagaccgggcagaactgacggtgttcaccatattccgcacgagctttaccgggaatctggctggccatttgcgcccaatacagcgatagcgccgcccagataaacggggatttctcactgccgatcttgccgaattcgcgattcaacaatgcgtcagcgtagagctccagctcatgtaccgatgatttttccagattatccagcacgacctgaatatgctcaggcgcatctggacgcagttcggcaatcagcgccgacagcaacaaacgccagtgctcagtacgaggaaatacgctcgcatccaacggcggcttgccgctagcggccgagtgctccagctccgcccgcatatccaacgtcagcgggtgatcgtgcagcgctttttgctgcgcttcggtaattctggcggcaaaatccagataatcagacaacggattatctagcgccagttgccgtaaacgttcggttcggcgggtatacaggctttttaaattcgcgaaaagtaacggcgggattgtccccgccgttgatgctctttcgctttgttgactaagttggtccttagggacaatgcgaatactcatttcagggtttctcttcctgttttttctgacggatttcccgataccagcgcggatggtgctttttcgcccatgccgcaggtacccagccttccaccatcgccgttatcgtgcctttcacccaaatggccgcataaatgtgaaccatgatgacgatgatcagccccaccgctgccaatgagtgcaccagtaacgccaggcgaatcaatggaatcgggaaatactcggcgaagtaaggccgccagataaccacaccactggccactaacagcaccagacttataattgctgcccagaatacgcatttctgaccaaaattatagcgtcccgtgtcgcccacttcctcattcatggcaattttgtggatatttttcgcccagaccaggtcttcgcggttgatcaggttgtgtttccagtaacggaaaaacatgatcataaacgcagcgaacataatcaccccggcaaagggatgaagaattcgcgccagctgcggcgtaccgaagatgttcatcagccagttaaaggaagggaagaagaatcccagcccactaatggccgccagcataaagcagaaggccactatccaatggttgattcgctccggtgcgctgtagcgctggatcggcttttcttttttcatttccgcgtctccccgtcttgctgttcggaagatggctgagtagatgacgatgaatctgacgatgcagggacggatttatcctcttcatcctcatcttcttccacccggttcgggccaacgccaacatagtggaaaatactggcggcaaaggtggcagcaaagcccaccgcagccaatggtttccaaatgcctttccagaaggtaaccgtcgggctaatggtcggattttcaggtaaaccgtggtaaagctgcggtttatccgcatggtgcaacacgtacataacgtgagtaccgccaacgccagccggatcgtataaacctgcgttatcaaacccacgggttttcaattctgccacgcgcccagccgccacttccttcatcgactctttagtaccaaagtgaatagcgcctgtcggacaggttttcacacaggccggttcctgacccacattaacgcggtcaacgcatagggtacatttgtacacccgattgtcgtccttgttcatgcgcggtacatcgaaaggacagccggcaatgcagtaaccacaaccaatacaatgctccgattggaaatccacgatgccattggcgtactgaataatagccccttccgacggacatgccttcaggcagcccggatcggcacagtgcatacagccatccttacggatcagccattccagcttgccgttttcctccacttcggagaaacgcattaccgtccatgatttagcggttaaatcggcggggttatcgtacaccccgacgttatgaccgacttcatcacggatatcattccattccgagcaggcgacctgacaggctttacaaccgatacaggtggtgacgtcgataagcttcgccacttcagcctgatagttacgatcctgcggcggtggcgtcagggaatgagtaccggagcgccgaataatgtcttgagattgcagtgacatagttgttctccgttacaccttttccacgttaaccaggaacgccttgaactctggcgtttgcgtattggcatcgccaacgaacggcgtcagggtattagcaataaagccttttttcgctaccccttcataaccccagtgaataggaataccaatggtatccacttcctgtccgtgaaccctcagcgtgcgaatacgtttggtcactaccgccttagctttgatatagcctcggttagagctgactttcaccgtatccccgtgcttaatgcctttcttctcggccagtttttcaccgatttccacaaattgctccggctgggcaatagcgttcaataacgcatgcttagtccagtagtggaaatgctcggtcagacgataagtggtgcccacataagggaattgctcatgggagcccatactttccaaatcgtctttaaatacgcgagcggccggattggaaatcacgttcggatgcagcgggttggtacccagtggcgtttcaaacggctcgtagtgttccgggaacggcccttccgccattttgtcgatggcgaacagacgccccatcccttccggctgcatgataaacggcccgacatcactgcctggcgcggcggcgctgtagtcagcaacatcgactccagtccatttcgctccgtcccattccagcagctggcgtttcggatcccaaggtttaccctgtgggtcagccgaggcgcggttgtacaaaatacggcggttcaacggccatgcccatgcccaacccagcgtattaccgaggccagacggatcggcgttatcacggcgtgccatttggttacccgctggcgtccagctaccggcaaagatccaacaaccgctggcggtagtaccgtcatcgcgcagatgagcaaaggtactcaattgctcgccttttttcaccagcactttgccgtcggcatcggtaatatctgccaatgcgcgaccgttgctttccatcgccacttcttccggctctggattgtctggcgtcaggtagtcccaggtcatattgagcacctgttccggcaccgcaccgccttcacgctgatacatctcgcgcaagcgcatcagaatacccgccagaatgccaccgtcgttcatggcttcgccgggggcgtctgcgcctttccagtgccattgcaaccagcggccggagttcacgatagagccgttttcttcagcaaaacaggtagatggcagacggaacacttcggtctgaatttttgacggatcgacgtcgttaaactcgccgtggttctgccagaaattcgaggtttccgtattcagtggatcgatagtgaccaggaacttcagtttggacagtgaagctattactttgtttttattcgggaacgaagcaaccgggttaaaaccttggcacagatagccgttgaccttaccctgcgacatcatctcgaagtactgtagtacgtcgtagcctttatcccatttaggtagccaatcgtagccccagctattttccttctgcgctttatccccgtagaaacttttcatcatgctgacgaagaatttcggatagttactccagtagttcacctgacccggcaacagggttttcggcgtattggcagcaagataggtttccagatccggctgtttttcggacggcaggttcatgtaacccggcaggctttgcgacaacaggccaaggtcagtcagaccttgaatattggagtgaccgcgcaaggcgttaaccccgccaccggccatgcccatattgccgagcagcagttggatcattgccatggtacggatgttttgcgcgccgacggaatgctgagtccagcccagtgcatacaggaaggacgcggttttatccgcagcactggtttcggcaatgtattcacaaactttgataaaatcttcctgcggcgtaccgcagatattgctaaccacttccggcgtgtagcggctgatatgttctttcagcaggttccaaacgcagcgcggatcttgcagggtgacgtcccgtttggcgtagccgttttcatccaactgatagttccagctggttttatcatatttacggttatcggcgtcgtagccgctgaacaggccgtcttcaaaggcaaagtcttcccgcaccagcaggctggcgttggtgtaagcctcgacgtattcgcggttaattttttcgttggtgatcagatacaacagtacgccggataggaacgcaatatcggtaccggaacggattggcgtatagaaatcagccaccgatgcagtacgagtaaagcgcggatctatcacgatcagcttggcattgttgtggatcttggcttccatcgcccagcggaatcccactggatgcgcttcagccgcgttaccgcccatgacgataactaaattcgcgttcttaatgtcaacccagtggttggtcatcgcaccgcgaccaaatgttggagcaagacttgctaccgttggtccgtgtcagacacgtgcttggttgtctacggcaagcatgccgagagcgcgactgaatttttgagtcagataacccgtttcgttactggatgcagaggcacacagcataccggtgctgagccaacggttaacggtcacgcccgcttcgttggtcttaatgaaattcgcatctcggtcttctttcatcagtttggcgatacgagtaaaagcatcatcccaactgattcgctgccatttatcggagcctggcgcgcggtattctggatatttaagacgactttcgctgtggataaagtcaatcaggccagcacctttcgggcaaagtgcaccacggttgaccgggtgatccggatcgccttcaatgtggaaaatactctctttggcgttttttgcaccgtcgccgaggctatacatcaatagcccgcaaccaacggagcaatatgtgcaggtattacgggtttcgcgggctcgcagcaatttatactgtcgcgtttccgccaacgccaccgccggcgcaaagccgagtgccgccgccgtggttcctgccataccgccagcgcagatcttaaagaactgccttctgctgacctgcatgggtctctcctcaattcacgattgtcacagtgtttttaacaggcgctttccccgataaaggcgtcagcgctaaaatcgttatctcactaccgctttgccgcgatagagaataaggttcacagccttatccttaccgtggaatactaccacactgtcattatgggatataacactcaggatcgcatcagtgagccagatcaaaccagcacaaacagccaattcgaccgatgtttgcggtgccagacaactcaagctgtggcagcggcaggacttaaccaccactcagcccgactggctggcggaagaagtgcctattgctctggtatataacgggatttctcatgtcgtcatgatgggaacgccgaaagatctggaggcttttgccctcggtttttccttatcagaagggattatcagtcgcccgcaggatatttacgctatcgacgttaatcccacctgcaacggcatcgaggtcgcaattgagctatccagccgccggtttgccggtttgaaagaacgacgccgagccatggcgggccgcactggctgcggcgtgtgtggcatcgagcaactggccgatattttccgcccaataacgcctttgcccttcagccaacgttttgatttaaaccatttggatagagcattggggcagctaaaacaggtacaaaccgtgggccagctcaccggttgcacccatgcggcggcctggattaacccagaaggcgaattattaggtggctgcgaagatgtcggtcgccacgtcgccttggataaacttttaggactacgagccaaacagccgtggcagcaaggcgcggtattggtttccagccgcgccagctatgaaatggtgcagaaatccgccatgtgcggcatcgagattctatttgccgtgtctgccgccaccacgctagccgttgaggtcgccgagcgttgcaatctcacgctggtcggttttagcaaacccggcagagccacggtatacactcatccgcagcggttaatctaaaggcggtggcttttattggctcaatactgagttaaagctgcacatagaggatcgaaccacgcggtgaccttatttcgctttagtgcggggaagagggggcagcagagaaagccatcattcttgagtgtgaagcacaaaaaaaaagtgcccgtcgtatcgaagagtgattgaattaaaaagaatattaaaagtttcgtcacacattcattttatcgagaacacgcagtaaccacacaaaaactacggcattgataatcattttcaatatcatttatttaactataatgatccgaatgcttacgtggcgctcactttttttgcgccgctctacactacggagacgatgaatatgagttactcactgccatcactgccttatgcttacgacgcactagaaccacatttcgataagcagacgatggaaatccatcacaccaaacatcatcagacttatgttaacaacgcgaacaccgtgctagaagcttacccggagctggctagcctgagcgtggaagaagttatcaaagacctgagcaaagttcctgctgacaagcgcaccttcatgcgtaacaacgccggtggccacgctaaccacagcctgttctggaaaggtctggcgctgaacaccacgctggaaggcgacctgaaagccgctattgagcgcgatttcggtagcgtagacaaattcaaagaagaattcgaaaaagctgcggcaacgcgtttcggttctggctgggcgtggctggtgttgaaagacgacggcaaactggccgtagtgtctaccgctaaccaggatagcccgctgatgggcgaagcggtttctggcgcatctggcttcccgattctgggtctggatgtgtgggaacatgcttactacctgaaattccaaaaccgtcgcccagactacatcaaagcattctggaacgtggttaactggaacgaagcggctaaacgtttcgctgaagcgaaaaaataagcccgattagccagagtcagcgcgggtttccgccctttctcgctaatgaccatgccggcagctggattgccggcatttttttgcctatagaattcccgctgatggcgcagatacatcctaagcacatcgctatttccacgagtatctcccccatctcaccgcagggaatagcaccagaacggctattaacagcgctttttattgctaaagtttaaccatgagttgccgatagattgtacaagaagaactattgcccacatcgctattgagaaacaaagcctgagttaaacaggctagttactgctcaatagttaaaccagcaataatcattccccaaataactagacccttccctgaattcaccagcgctgattgatctgtcttaggaataccgcataacggagaatagtatggctgcaatgagcaatttatttggaagctttgagaacgtaaaagtagggaaaaaactgggattaagttttttcattatgctgctgctggttagcatcatcgcaggtaccggggcttaccacttttccgagatcgaagcgcgcgcctataaggttgacctgagctatcaaattaacgatgaagtgaaccaggcaaagtacaatcgggcgctgtacgaacgatcttacgatcccgcgtttatgacggttaacgccaaacatatcaataatatccttacactgttggcgcaaaaagagaacatgaactggagcgctgaaaaccgcaaaaacatcgatcgaattatcgaagtgattaaagcctatcagctggaacagagagagtttctggctacggttgaacgaaaagataacgtccgcaaaagctggaacatttctgaaacccagaaatacctgaatcagcttgaacagaacttcctgaatgaaggggcagataccaacacccgcatcctactggcagaaatgaaccagaaactgatggcggtacgctataatgcccgtgggctgctgctggatcgtaatcaagaggcagaagactcgatgattaccgcgattgatgtggcgcaaaacgccgccaacgcattcctgccggtactgtctaccgaacaacagaaaatgatggcaccggttatcgacagtttgaaagcctataaagcgaatattctggcttacttaccggcttacgaacaggaaattgccgcaggaaaacagttagaaactaaagctatcgagctgaattctctggttaaaaatctgtttgttcaggagttacaaggcactcacgatgaaatcgacaatgcgcagacgcagatgaccgttgtcgcaatggtggcgcttttagttggtttgttaatcgcctggcgtattacccgccagattaccgtgccgttgcgtaccacgctggcgatggcagaacgtattgccaccggcgatctgaccgcggccaccacctcatctcgttccgatgaactgggtctgttaatgaacgccgtggcgcgcatgaatgaaaatctgcgcagcatgattgatgatattcgcattggcgtcagtcaggtttctcatgcctctggcgagattgctgctggtaataccgatctatcatcgcgtaccgaacaacaggccgccgcggtagaagaaactgccgccagtatggagcagctaaacgccaccgtgaaacagaacgccgataacgcacatcatgccaatcagttagccaccgaagcttctgataccgcgcagaaaggcggaaaactggtaaatgacgtagtgcgaaccatgagcgatatttccagcagctctaagcgcatctctgaaattacctcggtaatcaatagcatcgctttccaaaccaacatactggcactgaatgcggcggtggaagcagcgcgagcaggcgaacaagggcgcggttttgccgtggtcgctagcgaagtacgcaatctggcgcagcgcagcgcacaggcggcaaaagaaatcgaagggctgatcgccgagtcggtttcacaggtcaataacggcacttctttggtgcaaaatgccggtcaaaccatggagaatatcgttcgttcggtgacacatgtgcgcgatattatggcggaaattgcctctgcttccgatgaacaaagccgtggaattacgcaggtcagccaggcgatatctgaaatggatagcaccacgcagcaaaacgccgcactagtagaagaatccgctgccgctgccgattcgctggccgagcaggcgattctattggcgcaggccgtcgccgtattccgtttatcggaaaacacggaagccgacgattcggctcaggttgcgactaacacatcgccagccgcatctcgtccggcatcagataatgtaaaaacaaatcagcaggataactgggaaaccttctaatcctcgcactacgggagccgcttcgcgtggctcccgtccattcactcataccgattaaccctaagttatccatacaattttgccattggtagccagactgattgcaaggtattctgaatcttaccccgcgtaagcagacaaggagagcttaatggtttatccgcaggtctatatcggtaatatcgagccttaccccggcagcagccccagcgccattggtaagcgccaaacggacggcagcctgatgctgaagccgttaggattagaaggtgatgagcaggctgaaacacgctttcacggcggcccggatcgcgctctgtgccactatccccgcgaacattacgctcattggcgccagcaatttccagaacaggcggataacttcaatgcacccgcttttggcgagaatatctctacggaaggcttaaccgaacagaatgtttatatcggtgatattttccggtggggagaagcgctgattcaggttacgcaaccgcgatcgccttgctacaaactcaattttcacttcgctattgaggatctttcggtattgatgcagcaaaccggtctgtgcggctggctttaccgcgtgatatcaccgggaaaggtgagtgacgaacagccgatggcgctagttacccgttgctgcgatatttcggtcgctgaggcgattgccattgctttccatatgccgtttgatgaagaagaatatcgccgtttacttggtgccgccgggctgtctgctagctggagcaaaaccatggtgacgcgattgattcatggcgaaatagagaatttcaatcaccgcctgttgggccgggcgagagcctaaagatttgatctgcgtgtttcacaaaaaacatctagatatctgactaatacattagaaaaaaccgggttgatagcatggccatcaactcggtttctattacaccgctgataaaaatcagaacgcttttttcgcgtaaccggtcacttctttcagccccatttcacggcctagcgccgtcattgggtgcaccacgatcaaaccacgagccacttttttcagtgaacccatatcggcctgttcttttttggtgatggctcggctgaatggcattttggtcaattcctgcgcctgaacgctcaggttttttacccgaacctctttcaaacgctgaatttcagcagccagtttttctttttctttcatatgctgggcgatcaaatcaacgttaccctgttgaatgactgcggtatctttgtggttcaatgcatccagcatgtcgctcagacgtttgatttctgcttgttctttcataaagttggcccgtacatgccactgatgggcacgaaaattcgctaaagttggaaataggatatcacctatagtgtatcaggatgcgcttctttcgacagcccgcacctgagcagatcaccagccaacgcctgcgggtaatccactgatctcacaggctgccgctcctaccaccgccaaagcctgggtataactatcgttaaacggatagcagcatgacaggcggaaagcgtgacgatagcgcccgctgggtgaatatagcgtgcccggagtcaggcaaatatgctgttgcagcatttgatgatacaacgcaacggtgtccaccgagggaggcaattctacccaaaaaacgaagccgccggcaggtcgggtcgctttcgttcccaggggaaagtgtcgattaatcaagatacgcgcctgctccacctgagtagcgtagcggcggcgcaatccgcgtaagtggtgatcataaccgccggactccaaaaacagcgctagcgtttccgataacaacgccggttctgccatcgaagaaacggcttttagcttgtgtaacgcttcggaaaaacgaccaccgtcaatccagccgatacgaaaatcaggtgccagcgtttttgtaaaactagagcaaaatagtatccaaccatcccgatcgaaagctttcaccgctggcgacaaactgctgccaaactgaatttcagcgtataaaccatcttcaataagcggcacctgatgatcgttcatcaggcgggccaaccgttttttggccgccaaaggcattgtgtaaccaagcggattttgcaccgtcggcattgcaataaccgcattcagccgcccttcctgaagcagcaattccaacacatccaacgataacccttgcagcggatcggtcggaatttcaatggttcgcaaacctaaactggctaacaatggcatcagatagaaataggtcggcgattccagtccaacgcagtctcccggtttagtggtgacacgcaacgccagctgtagtgcctccatacaaccgtgagtaatggttatctctgcaggatttgtcaccatccccaaagttagccctcgacgagcaatttgctggcgcaaacgctgactgccaggtggtaatgcgtatttgctgattaaatccggctggcggcgtagcaaagaagccatcacacgccctagcttggcgctgggataaaaatcagatgtttgtgggcaagccaatgaaatattagtaaaagccgggttggactgagcggcaaacaccgtttctatcaaatccagcacctcgtccaccggtttactagccgaaaccgttggcaccagcgcactggaaggagtgcaaacataaaaaccggactgcggacgtgcctcgatcaggccacgatcttccaacgtacgataggcggccaccacggtattaatgctgacctgatggctctgggcgcagcttcgcaccgacggcaagcggcttcccgcagataaactgccattatctatcgctttggttaacccatctgcaagttgtaaatagcggattttattagtaatagtagacatagtgacaattctccactgtttcgatgggtacagtttaaagtttgctttactgtacccatcagaatagagaacttctggttctgccgccaccgtccattgctggttatgctaattcctttgttttatttcactgaggaatccccatgctggatagcgcatttatcagttatgtcaccgttatgtccatcacgcccggtccgaataatctgctgctggctgcatccggcgtcaatttcggcctgcgaaaaaccgtacctatgatgttaggcgtgaccttcggcagcgcctttcaatgcgcgctgaccacaacgctattggcattggtactaagctgggccacggtgattcgcctgcctttggtgacaatcggttgtgcctatttactttggctatcgtggaagatttatatgtctggcgcaccgggaagccgggaaaaacagcagccaatgagttttattcaggcctcactatttcaggccatcaatcccaaagcctggctgatgagcatcaatgtcgcgattctatttacccctagtcccggagaaatgctcagccacacgctgctactggtgagcgggtttgccttactcaatttgccgtgcgtgggcgtctgggcagtcatgggggataggttgcgtcatgccctcacggtgaactggaaattgcggttatttaacgggttaatggcaggaatgatggcaactaccgccctgtggctattagtcgatgaatggatggcggtctaccaataaaaactcaggaaggcagaatcggcgacagtttagacactttctttaagctgatacgggaaatgaactcggtaatcgacaagaccatcgttgaacgcaaaacctgctgatagcgttggtgttgcatagcaataagagaaggctcggcttcttctggtgtgagaaatgtgggaacgggcggtaacgcggttacacagtgcaactccccaaaggggccgagaatctcatcgtcggtgaaacgatattccgcgccgtcgtggttcatttcttcacgcagcgccattaaaagttcggcatcttcatattcatgacgtgaaatcacgcccaaggcataaaccagcttcaaacgcacagataattcgcccaagggaccgtcaacaattaatagcggttccacggcatacttcaccgcatagtcgtcctttcggaaaacctgcaccactaaaatgtttaaggcttcggccagtagatcaacggcggcgataaggaaacttcggacggttttaccggcgttaagctgttccagaaccctattttcaaatgcctgtgctttttcaatcatctgttatctactacagtggttggttaatggccatcctgcggactttcccccacgcatttcacacggtcgcagccccgcgacaatgcaaaatctactgggttataccccactcactgagataaataccctgttgttaagccgatatttagagcagaaagactcgtccctctgctcttatcatcattaacaagcatccgtggttactgacgcggtatttatctcccgactcaggccgggagggcaaatccgttggcatatcccgtcgtgagccgcttttgccagcttaacgcgccaggttttcctgcatggcgttatacacattcaccgcctgttcgacaacctcgctattcgcaggcaggccagaaacttgcgccagtgcagcttttgcgcctattttatccagtaattcgctccattcctgcgcctgcgggtcctgctcactgcgatagctcattgcggcggcaatacctttcaccagattatcgtgaggcagatgatattccagcgtgcccactaacggtttaatcagacgatcgcccgcgcccagcttacgtaacggctgacggcccactcgttcaacgtcatcatgcaggtaagggttttcaaagcgtgataggattttattgatataggcggcgtgtttttcagggtcgaagccatagcgcttgatcagcactgcgccgctctcttccattgcccctttcacaacctgacgaatttcggcgtcaagaatggcatcgcgaatggtctgtaggccagaaagttgccccagataagcggtaatggcgtggccggtattcaaagtgaacagtttgcgctccacaaacgccatcaggttatcagtcagttccataccggcgatttgcggtggttggcctttaaactgggtttgatcgacaatccactcgctgaaagtttctaccgtcaccgccaacggatcggtgctgccttctgcggaaggaggcacgattcggtctacggctgaatcgacaaaaccgacatgttcttccacccagttcttttcatcttccggcaacgcggcccaaacatgctgcttgaactggctggtgccgcgcaccatattttcacaagcgataatattcagcggctgattattaccggcctgatggcgggcaaccaacccctgcgccacgataccggcaatttttgccaaaacctgcggcccaacggctgtagtgacaatatcggcctcggcaatcagccccacaacttccgggctaccgctatgtaccgcgctgacgtttttcacgtcttcaatgcgcgcctgctcaccgacaaccgtgacctgataggatttacgacgattcagttcatccagcaaaggctggttcacgtcagcaaaggtcacctgagctccggcatcggccaacaatttgccaataaaaccgcggccaatgttacctgcgccaaaatgtaatgctttcatagttttttaccttgaatttgccgttggaaaacgggggccattggagaattccggccccgattcgggctgcgcaatttgctgcgcagccggacaacactcaccgccctcaggcagatttcttaccggagagcaggtctaaaacttcctgcacactttctgttttgctcaggcgcgcgatgacggaatcatcatccagcgcattggtcaggctggtgataacctgaatatgctcgttattacgtgcggcaataccgatgaccagacgcgcaatttcatcttcttcatcgccaaaacgtacgccattcgggtattggcagaacactacgccggtacgtaatacgcggtctttggcttcgatggtgccgtgcggtaccgcgatagattcccctaaataagtggaagtcagtttttcgcgttccagcatggcgtcaacgtattccggctcaacataaccccccttaaccaactgctcacccgcgaagcgaatggcctcttctttggtcgccgcatgcagattcaggaagatgtttgctttacccagcttgaatagttgctcttcagaagcttcaaaactgtcatccagggtttcgatcactttctgcactagcggtgcgctttccgcctctttactggcttccagcaggcgagtcgtcagattggtatacagctggctatcgaggaagttggtcaacgaaatgtgctgtgcctgcggggcgtgacgcattgcccgctcagtcagatctcggtgggtaataaccagatcgacatcttccggcaagttattgattgcacagttagtcacggagatatgcttcaatccggcatcctgtacttttttacgcagaaccccggcacccatcgcgctcgaacccataccggcgtcacaagccacaataattttacgcacggtagtcagatcgcccgcggcggcagcagcgttagccgcctgaacgcctttggactgttgcttcatgtcctgcatgcggcgagtcgcttcttccaaattgtcttcatcatctttaactttggtgtttttcagcaagatggctgagaccacgaaagagacagcgaaagcagcggcaaccgcagcaatgttagcgaagtaagctcctttaggcgtcatcgccaatacggccagaatagagcctggagaagcaggagaaaccagaccgccgttcagcaaagtcaaagtgaacacgccggtcataccgcccaaaatcaccgccaacaacaggcgcggattcatcagtacatacgggaaataaatttcgtgaataccgccgaagaaatggatgatggctgcgccgccagcagattgcttggcattgcctttaccaaagaacatataggccatcagcacacccaaacctgggcctgggttggcttcaatcaggaagaagattgatttgccggtttccgtcgcctgctggatacccagcggagagaagataccgtggttgatagcgttgtttaggaacaggattttcgccggttcgacgaagatagaagccaacggcagcaggttatttttaaccataacatgcacgccagcagccaacattttggacaggatttcgaccagtgggccgatcgccataaaggccagaatagccagtagcatcccgataataccggcagagaagttgttaaccaacatctcaaagccgcttttgattttaccgtcaacccaacggtcaaagcgcttaatagcccaaccgcccaacggacccacgatcatcgagccgaggaacatcggcatatccgcaccgacgatgacgcccatggtggttatagcaccgacgacgccaccgcgttcgccaccaactaagcgaccaccggtataaccgattaataacggcaataaataggtaatcattgggccaacaagcttggctaaagtttcatttggcagccagccagtcggaataaataaagcggtaataataccccaagcgataaatgcgccaatatttggcatgaccatattacttaggaatcggccaaagttttgcactttaaccttaatgtctggtgaaagcataaaaacacccctattggtacgcgctaacaataagagcgcgagataattattaaggcggcactgcgaaatccgccgaattgctgtatgcaatttaaactctagcatgggctgtaatgagggcgtaatccgcaaaatatttgtgatgcagatcaccacaaacaccccaaaatagcgtgctaattagtgatatcagtcacatttatgccaatcaattaagtgaaattagtgcaacaattaatcaccacatggaataaatgtgattaagatcacccttagtcccgtctattttgttttggaaatgtgatgtttatcacaataaatttttcatcaaaaaaggaattagaggcgatgttcgaggggagccagacttattaagccgctttaccagggaggaagtatttaaacgtgaattagtcaaatagccagttgagttaaataatattaattaatcaattgaaatttataaataaaaatataattaaagaatttcttaattcagcaatctcgagccaacggatctaaaattgataattaatgagtaaggctgtcacttttacatttggtgagcttgaaatttacccaaggctaacctagggtttaatcataaagaacaaccgattaagcagtaagatttcatttttataaaaatagatctggccagctaatttaagggtaaatgatgaaaaaatattatcttatctgtggcatcggtatacctatgattcttctcaattctgctctggcggcgaccacaacgggcagcattaatgccacattaacgttgactaacggctgtttggttaacaacagtgcagcaaccagcggcctgacattaggtgtcttaagctttggttcattcaccaccaccggatttaccggtggctcggcaactctttcgggagcttcaggtacgggaagcagcgccatcagcgtgaaatgttcccctggtatcacccctgtgctaaccattaccggcagtaatgcagctccggccaacatacacggcactgtgccgtctaccggcccgcgctatctggtcggtacaaccaacacgactcaggcgattgcctatggtctttatacttcgaattcttttaccacaccgattgtcaacgccactacagtgacgccaaccaccaccggcgatgccacctacggcaacctgtataccttcttcggtaacataaccggcgtaaccggcggcactgacatttacccggatatttacaccgatactatcggcgtacaggtaacttattaacgtctgggagaatggagaggctatgtgccatagaaaatggggttttgcattttttatctatcatagcccagcaatattagtatttttggtctttccggtattggcattgccgacacaatcttttcaggtcggggcaattatttccaatggctgcctgatcagcggcactaataccggcgtatttgggcagattaatttcggaacttaccccggcacgtccaccgctcaggtcaacggtacttatacgcaaagctcgactattactctcgcctgcacgcctggtacccttctcaatatgagtattaacggtggagctaattacacttcgacccgtaatcttaaaatcagcggacaatcctatttagtgccctattcactttataacagtacaaccaatgcggctattccggtcaatagcaacgtcgccgtcacctttagcaatgcgaataatattactttgccaatttatgggctgttaactctgaatggaaataactattcagggctttatacggacaccttaacagtgactttaacctggtaataaatacaatgaaaaaaataaacactctcgctaaaaaatgttataagccatttattttattaattttaaccgggttttccttcaatattttcgcaaccaataatgtgttgatttggcctattgacccggtcattcccgccgatcaaaagtcctctagcctatgggttgaaaataaaggcgatcaggccactatgatgcaggttcgtattctgggctggcagcaaacggcgggcaaagaaggttatctcaatcaacaaaacgttattgccagcccgccaattattcgtattgaagccggtaaaaaacagttaattcgtttaattaaacaggtgaatcctactgcagggcaagagcaggcctaccgcattttgattgatgaaattccgactccaacgctttctgccaaagcgcaggaaggtgcaggcgttaattttcagatgcgttactccattccactcttcgtctacggtgatggattggattacggcaatgtggccgcagacaagaatacccatcaaccacagctaagctggcaattggtggagctacagggaaaaaaaatgctggaagtcaccaatagcggtgcaattcacgcgcgtctgagcgatgtgaaacttcagcaaggcggccaaaatcatcaggtggcagaaggactattaggctatgttctggcgaattccagccaacgctggcctgtcagcgtgagttccgccagctcgctgaccatgcaagtcaataatcaaaaaaacgtcaaactcagcatgaagtaatttaatagggacgatcagaccgcatactgatgaaaaactaccgtaattctcctttttgggggctggttatcattacgacaggtttttctggtttttatactgaagcgcgggcagatgaggtgatgtccgagctgcctccaccgccgagcgcgctatcggccgatggggcgattcagtaccagctggaacttgttattaatcaatatgcaacggggcaggtcgtaccggttgagtttcagcgtgggcattatttggtacagggaaaagatctagaacaggcaggcattatcgccgagcacctgacgttcccaacgactgatatcagtaccaatccgaatattaaactaaaatatgacagcgaaaaccaacgcctgctgctcgatgtccctacccattggctgcctaatcaggcgctatcgaataacatgggaaacccaaaatatcaggctgttagcagcaccggagcgttattcaattacgatatttatgcctcccgctaccaaggtaatagccagttggcggcatggagtgaacaacgcctgttcggtactcaaggctacctgtctaattctggggtgataaagcagacgctggccggtgaatctatcgataataacggcggctacctccgctatgacacccggttttcccacttcgacgaaaccaatgccgttcgctggcaggcaggggatttgatcacagattcactggcctggagcaacagcatccgcgtaggtgggctcagcgtttcccgcgatttttctattcgtcccgatatcattaccttcccattgccgcagttttccggtcaggcggtcgtccccacatccgttgatttatttatcaacggcaatatgaccagcagcaataacgttcgccccggcccttttactctgaccaacgtgccttttatcaacggtgcgggagaagcgacggtcatcaccaatgacgcgttggggcggcagatttcggtctctttgccattttatgtcgccagtaccttgctcaaaccgggtttgtccgattacgcattttctatcggagccatacgtcgtggttatggagtggatagttttaattatggctctgccgccgtgagtggctcttatcgctatggcgtaaccaattatcttactctggagagccacgccgaaggtgcggaatcactcgctttgggtggcgtaggcagcgtgtttaaacttgggaatctcggcgtagttaacgcgtcttacagccagagccaaatgcgtggccagaatggcgatcagataagttggggctatcaatataataccggccttttcaatttaggaactcagcagacataccgcagcgatactttcggtaatttggcaatttacgataatcaggacgccaacagtaccaacagcggcagcaataataacggtgcgatttattcccttagccgccgcagcgcacaatactccgccagtattatgctgaatgaattcggcaatctgggtgccgcctacattgacgtcagcggaagaaatgacgagcggacgcgattgttgaatctctcatggagccgcacgcttttctccggtagcaatctatatatttcagccacgcgagatattggtgctaacggttggtccggcgcagtttcgttggtcattccatttggcgcattatccaataccagtatttccagccaacgtagtattgacggacaggctcgtcagcaggtgagctacagccgcggaatgcctagcgatggcggcctgagctgggatctggcctacgctcatcaatccgatcagaaaaattatcagcaggccagcttgaactggcgcaacgccagctttgaatccagcatcggcgcctatggaaataccggagactacactcaatgggcagatttgagcggctcgttagtattaatggataaatcgctgtttgcgaccaaccgtatcagcgacgcttttgtattggtcaacaccaacaattatcccaatgtgagagtgcgatatgaaaaccaactgattggcgtgaccgatagcggcggccatcttttggtacccagagtcacgtcttattatccggctaaatacgagattgataccaccgacctcccggcgggtatccaaatttccaatacagaaaaacggttttcggtgcagcgaaacagcggctatatgattaatttcgacattaaaaagtcaaactcgctcagtttcgtcgccattgaccaacaggggaaaaatctgcccgtttccagtcgcgtgttgaaaaataatcaaacgcgcacttatgtcggctgggatggcattgtgtatctggaagatctcgaagctagcaatagtttgaaaatcatcaccccagacggtcgtcagtgccaaatcactgtgccttttgacgcttcggcgcctcagccggtcatactcaaaagcccgatagtctgtacacttaatccggctcaggtgaattaaatgaaaaaaatcattggtctcgcggttcttactatcggctcactggtgggcggaatccaaagcgctcaggcggcctgtagcactgcgtcaaccaacggttccttcggtagcgccacctcttttgccgtcaataccacggctagcaatacctcgggttccgttacagtaacctgcgcggctctgagcataggcttgctcactcaagactccatcaccttatcgctggttagctccaccgccgtcaacggcacctatgctgccatgaccgccggtggaaccgatacgatcccggtaacggtctgcgcggccgttcctacagcgacaacctgtgcttctccgctgccgttaaatggcgctagcgtcacttttgccggtgccagcctgatcaatctctctttgactcaaaaacaattcactctaccaatttatatacaaacggtgatcggctcaaacgtagcggcgggaacttatacaaccacgttgggaatcaaaaccagctactcaatctgcaccgcactagtctgtctgggtaccgcaggaaataccaacgggcaaccaatagtaccggtcactgtgaccatcatcgtcactaacgactgcacgacgatcaccgcgccgcccgtcagttttggcactcaacccttgctcagcagctttgcctccgtcagtaaccaggctatcaacgtaatctgtaccaagggcagcatttatactgtcagtctggataatgggcagcacgcggtgagcaatgtgcgctatatgtcgaacggaacctcttctatcgcttacgacatttatcagggtgcaaccagcaaccgttggggcagtctggcggctggtcaaagttggtccagcagcacctccaccagtattagcaccgatttactgacgcgcacttttgcctatacggcaacgatcttaccaggccaaaccacaccgccagccggtacgtataccgataccattatggtttcattgtctttttagctgcatataagggaagtcgagaactggtgcaaagagtcgaggaacgagaagaagggaaagcgaaaaagaacaaagggaaaggcgttataccaaacggagtaaattctgtcaggccaccatcattatggcctgacattcactaaactgattattctagagcagcctgaacgcttttcttcgcggcagccatcgccggatacttagccaccagattggtcatcatggtgttgtactgcacggcctgagcctgagtcgggaactgcacgccaccgttattaaaggtcacctgtgcgccctgctgttgcaggaaatcacccacttgcaccaaatcctgcacgaaggcagcaacggtcggaatagcgggaatcagtgtggcagatggctgagtcaccaacttgtcgtaaacctgattgtaaaccgccttcagatcatccggctgtttcaacgccgcatgggcgctatcggcctgatgcttggcagtttgaatttgttgagtcaataaattgagcgtgcctgccgcttgctgtagcgccgcacgtttattcacgtaatcctgcgccacgcgaatttcatcaatctgagtgacggctggagtaaagcccgcttcgattgatttatttaactgctgcgtaaaggtcactaaaatcgcgtaatcaccagcatagttaccgaatttctgcttttgatcttcgctcagcgttggcagtttcatcccgctgcgcatgacggtattttgcagatagtcgatgaaagccttgcgttgctcaggctctttatcgccacatgcagtgagctggaacaccataaacagcgccaaaattgacgttaaccaacgagaataccttgtcgtattcagtgcaaaagccatgtggaattactcctgtaataagcgtttattttcactagtgtccgttcttattacccatccctgaatcaataagaatagcgcaaagggagaggttttctccccctttgctttgaccgcaggaccgttactgtagcagcgagatatccgctacctgcaagaacagctcacgcaatttacttaacaatgtcagacggttgatacgtacggcatcgtcttcggccatgaccatcacgttatcgaagaaggcatcgacgttttcacgtaacgcagccagttcaaccaatgcttcctgataacgcccttcggcaaacagcggctccagctgatcgcgcagcaccaccagatgcgttgccagctgcaactctgcggtttctttcagtaccgcagcgttcacgcgatcgttcagcgtatcgctagatttcgccagaatattcgatacgcgtttattggccgcagccagcgccgctgccgcttccagagtacggaaatggctaaccgctttcacacgcgcatcaaaatctgccggtttggtcggacgacgagccaacaccgcctgaatggtatcaacgctgtggccttcttcctgataccaggcgcggaaacgacccagcatgaattcaaccacttcatccacaaccttgccgttagtcagcttgctgccatacaggcgcaccgcttcttcggtcagggtttgcagatccaacggcaagttcttctcaacgagaatacgcagtacgcccagtgaagcacgacgcagcgcaaacggatctttatcgccttttggatgctgaccaataccaaagatacctgccagcgtgtccatcttgtcggctatcgccagtgcacaagcgaccgggttagacggcagatcgtcaccggcaaagcgcggttgatactgttcgtttaacgcaacggcaacgtcttcagcttcgccatcgtggcgggcatagtgcattcccatcacgccttgggtatcagtgaattcgaataccatgttggtcatcaaatcacacttggaaagcaagccagcgcgcgtagcatggttaacatccgcaccaatttgttctgctacccaaccggccagagcctgaatacggtcggttttatcacgcagcgtccccaactgctgttggaacagcacggtttccagacgcggcagattatcttccagacgctgtttacggtcagtcttgaagaagaattcggcgtcagccaaacgcgggcgaaccaccttctcattaccggaaatgatttgctgcggatctttagattcgatattggcaacgaagatgaagttaggcagcaatttgcccgcggtgtcatacaccgggaaatatttctgatcccctttcatggtgtaaaccagcgcttccgcaggaacagcgaggaatttctcttcaaacttcgccgtcagaactaccggccattcaaccagcgaagccacttcttccagcaggctttcactcagatcggcaacgccgccaatcttctgcgcagccagctcggcatcacgtttgataatggatttacgcaattcatagtcagcgataactttgccgcgttccagcaggatctgcggatactgatcggcattatcgatggtgaattcggcttcacccataaagcggtggccgcgaatcacgcgatcagaatcaatgcctaacacggtgccagcaatcagctcattccccagcaacagcgtcacggtatgcacgggacgaacgaattgggtttctttatcaccccagcgcatcaatttaggaatcggcagtttgctcagcgcggtattgaccataccggccagtaacagctgcgccgactggcctttaacgtgggcacgatacagcagccattcacctttatccgtagccagacgctcggcctgatccacggtaataccgcaaccgcgcgcccaaccttcggcagccttggttggcttgccttcggcatcgaacgcctgagaaatggcagggccacgtttttcaacttcacgatcggcctgagccgcgctcagattggctactttaaccgctaaacggcgaggagcggcaaaccagctgacgtcaccgtgagataaattggcgttatccagctcggcggtcaggttggcagcaaaagattccgccagggaacgaagagccttcggcggcaattcttccgtgccgatttccaccaggaaagtctgttgagtcatgacagcctcttagttctgattctttttgcacatagggaagccaagggcttcgcgggaagcgtagtacgcctcggcgacagctttggtcagcgtacggatgcgcagaatatagcgttgacgctcggtcacggagatcgctttacgtgcgtccagcaggttaaaagtgtggcctgctttcaaaatgcgctcgtaggccggcaacggcagcggattttccagcgccagcaatgactgggcttctttctcatactgctcgaagcaggagaacaagaaatccacatcggcgtattcgaagttataggttgattgctcaacttcattctgatgataaatatcgccgtaggtggttttacccaatgggccatcgcaccagaccagatcgtatacgctgtccacgccctggatatacatcgccagacgttccagaccgtaagtgatttcacccgtaactggcttgcactccagcccgcccacttgctggaagtaggtaaactgggtgacttccataccattcagccacacttcccagcccagcccccaggcacccagcgttgggttttcccagttatcttcgacgaagcgaatatcgtgaatggtcggatccagacccaactctttcaaagaacccaaatacagttcctgaatgttgtctggtgaaggcttaatgatcacctggaactggtaataatgttgcaggcggttagggttctcaccgtagcgaccatcggtcggacggcgggaaggctgtacataagcagcagcgattggctctgggccaagcgcccgcaggcaggtcattgggtgggaggtacccgcgccgacttccatgtccaatggttgaacaatggtgcagccttggcgcgcccaatattcctgtaacgtcaggatcaggccctgaaaggtcttggtatcaaacttttgcatgttggattcgcacgcgatacaagtggataaaatggaatgaatcagtatacccgctgaccgtaagatatacagccagaatccggcgagatgtgtaaatcagagggggtttgttgattaaatatccagttaaaggacgtgaaataacgtagtaaagcggaaataaccggcgagaaccttaggtaaaataatagaattccgatgaactaatggaatcaatctatgactcgcctgcggaaatagcacggtcagaaccgtatccactgatataaaccgagcgacaagaagtaccggtaagatacggtctgaaactgttaatcacgacaagctctttcaccgccagccccttattttaataaccaatccagcagtgccatgccaacggtgaccacgcgactgaatcggtattctggtcacggcggcgccctatcggagcagcagggatcggttccctagagccatactcgataaaacaatgatctgatttttggtcatcgcacagagatgggtaggtatcacatgaaaatgcccctccgcctaagggataagcggcaagagtatgagagcaaccgaggagcaaccccagcccaaaggtacacactgacgacatccttagaatatttcgcttagatgacataatatacactcctatataattacacattgcaacaataatggtgtttaatgctgcaattgatcaattattaaccaatggttatctgcgtcaagtttctgcccaaatataaaatgagtaggttgcttatcaggcaccgaacggcgattatcctcctgccgagcatctcatagaggaaacagtaagatggctttagaacgctgtggttgggtcactgccgatccgttatatcttgcctatcacgacaaggaatggggaattcctcagcgaaacagtcaggcgctgtttgagatgatctgtctggaaggacaacaagccggcttatcttggattaccgtcttaaaaaagcgtgaaaattaccgaaaagctttccataatttcgatcctcatttggtagccaaaatggggccgaatcaggtggaagcattagtgcaagacagtggcattattcgccatcgcggaaagattcaggccattattaccaatgctcaggcatatctggctatggaggctaacggcgaagatttctccgaatttatttggagttttgtcgataatacgccgaaagttaatcactggtggagcctggcagaagcccctgcaaccacacccgtttcagatgcaatgtccaaggcgctgaaaaagaaaggctttaaatttattggctcaactatctgttatgcctttatgcaagccacaggcttggtgaacgatcatatgtgcaactgtttctgtcatccggataacgccaataaatgatccgtaaggcgaatgctgaagatcataatgcgttgatcgagttatggttaccaagcaccatcgctgctcaccctttcgtgccagagagctactggcgcgaaagccttgatttggtaagcaatacctatattcctcaggctagcaattggctatatgaaacaccgaatggcaccgttggatttatcagtgtactgaacgaacaattgatcggggcgctgtttgttgagcaaaactacgtcggtcaaggcgttggccatgctcttatgcaacatgtgcaaactcgttatcctgcgttaatccttgaggtttaccaaaaaaatcagcgagcctaccgcttttaccgtaagcatgggtttaacgtttcagagcgatcttataatgaagaaacgggaaattatgttttaaccatgcattgggtaaatcatcaaagataaaaataaatattattggctattttcctactaagactattaaattttaattactgactacaattggcctcgccgcaaataaaaaaataaatgttattggataggttaatattcaaacctccaccttataaaaaggcacaatataataaatcatttttatataggcctacactttccgcgtcgatgaaaaacccaagatgataatggaatattatttatataaacattcatatttcattcagaacagcaacttaatggtgctatgactatggtcgataaaactaagcccccgttatttttgttcttgctttcatccactccatccttagccgaagacgggttctatttcgaatagtatatatcaaaatggatgcgtgtatgaaaccccaaataggcaaaatgaataaaacatgcttttattcaaacgattacttcagttggaaaccatgatgtttactccctaatagcaaactggatcagaaatctcccgccgctgatctgggcataaagtctatactgggaccaggttacgctttacaacgttgtcattcatgggcgttataatcaggtcgaaccgcctggcgcggtataaaaaatttttcccggtaaagatatactttgctcaataaacggggaaattgttagcctgagtatgactgactataactgtgataataacgaaattgcagatagaaacagcattgaactcgccctatcattaacgaacccacttttttattggatctacccgcgaaggtactataagaagaagtgaaacgaacggcgcaagttcattctctaaccacatgaaatataaaacaaagagatggaaaggaaaggaaaggaaaggaaaggaaaggaaaaactattttctctggtagtttcaagccatcagaaaaagtgagaattggattcaaatgtgatgaacgacaatattaataaagcaactctaccagcctaatatctctatcacctgcatctttattttttgataaagacacctttagtgattccctgttaataactactcatcatgtatttaaaatcatatttaacttatcaccctatcaggatgacaagttaaattgtttacctagtaataataaagccattttccacaccataaataacaaaacaattaaaagggattaatatgtataagaatatactgattatcatcctgtcttcatttttattaacaggagcgccaagcatagttttatctcaggacttaccgtacacaaataggataaatgatattgggccaatttatgattatgatgaaccaggaattgaaagtggctatacgttaattcaaccggaagagataatttatctggacatcaatgatattttttcacaacactggcaatcaagaaaagaaacctccgtcagtaatccctatctggattgcgatacagactgcacaatattacagaaaaaaattatcccactaaacgaaatttttactcaagccgctattgatccgaaccattccagccagcaagttttattaagttttgccctaaccgaaaccaatgagttcaattttagcattggacaatatctggatatcatcgttgataaaaatagtgtccgtctgcttggcggagctgtgccaaaaggcattgaaacccctcttaatcatcactccaatcagctcacttttcttttccacgttcaagaccagcaactctctatgagttatatggagagcgacagcacgcaacagcgctacctttcaccaacaataaatctggaaataaaaaaatcaaaagaaataaattattggccggatatcgagatattcaaccccaatcctggcaaccctatactagtaaagaaaatactattaactagccagagcactcatagccgctttaaacgcggcatcgccgggaaaataggctgttatctgtctggcccgctggcactctacaatctggtggtgcaagggcattgcactcaggttgaatctgcatggtcgagcataaagtccttctttgccggaaaggacagcaccaaaatgatagtgattgcagggaatcccattccgctaaaaccgacggttaccccaccctctgagcagactgataacctgaatgcattcgaactcagcgttttgaatacccacctgcatcaccaagcgctaacgttgcctgccgcagccgatttctgccatacatcgatagatgaaatcaaaggtgctcgctatccgcgacaaatcagacacacttgcgccaactggctatccgtcgtgttacaggatttcaccctgctattcggcaatagcctgcgtacctggtccgcagagtatctcacccaaacgctaaatggtattttggatcgccaggcaattgataatgataacgacgcccaagatgcttttattcgccaacctgccgctggcgtgcgactcatccaaaccattgcagatattgctgatagagaaggccgagccgaagttattgagcaagttagcggggcatttactcatgcggtacagaattatgccaactatgtgatgactcaaccttcctccggcccctgtactccttcctgtagcgattcaagttcaagtcatagcagctgtagttgttccgattgcgatatagattcgccattagcggctcaggaattgccgctcggtacttatcagttaactctctccgcctatattcctcaacatacgcaaccgctgattttacaaaatggattatgggtagagccagcgcaaggttttgatatcgaaataatccgaggtacttttgctgagactcgccaacaacgatatgaattgatggaaacaatccagctatggcgaaatgcttatatcgaaaaaagagtgtattgcaataaatacgggaatttccccacgcaaatagatacggcacgcttcgccgggcagtccaccagcactctgctgcgcagtaccttgcggtactttgacgaaaataacctgattgcagtagtccgatttaataaccaaattattaatgtgagcgcggtatctcgtttttctgatcccgatgaagacgcaagcatcatacaagcgaatattattgctacgttgactcacccggcctacgttttaacccccaataatgaaggtaccgttcgccgcgctggcacggctgctctgcatcaacttattcagcaactgattgccgatggcgttcaaacgcttagttcacatgtcatttcaacgccttccgctattgtgaaaaagcgccttggcttcagttttatccctgacaaaccccatagcatcacgccaacacctaatagcgatctttagccaccggctctccgccctgataatttcttattctgggcggacaaccatttcaatatttgatcaacagacttttcgtgcgctctttgacgataaaccggccaaaaaaccacattgcgcggcactatcagagttttctcaatagtattctgcgacgttttaccggataacgatgcccatcattttcagcttccgaacccttagcgggagcttgcttcaggttttagcgacggtggataatttctttacgaaatccacgttgataaacacatttaaggacatcacatgcaaaaacgcacacttgccattgttgctgcactctgcgcaactttgactctttcggcctgtaccactaacccttataccggcgaatctcaagctggaaagtctggctacggtgccggtatcggagccttagtgggcgctggcgtgggggttttatcttcctccaaaaaagatcgcggcaaaggcgcactgattggcgcagcggcaggcgcagcactgggtggtggtgccggttactacatggatgttcaggaagccaaactgcgtgacaaaatgcgtggaaccggcgtaagtgtcactcgtcagggtgacaatatcgtactgaatatgccaaataacgttaccttcgacactgatagcagtaatttgaaaccagcaggtgccaataccctgactggcgtggctatggtattgaaggagtacgaaaaaacggcggtcaatgttatcggttataccgatagtaccggcgctcgcgctcacaatatgaagttgtcccagcaacgtgccgacagcgtaggcagcgcattgatcactcagggcgtagcggctaaccgtattcgtaccattggcgcaggcccggataacccagtggcaaccaatagcactgcggcgggtaaagcacaaaaccgtcgagtcgagatcacacttagcccgctgtaaatgacaaaaagggtgacggctcatcactttctggccgtccccccttcacccccaaatctttctcgccccagaacatccccgataaacaccgccaccgcgcaaagataatctatatcactaccctatggatttcactttgtggcaaggcggcaaccgaaagagtcgccaagagcttagtccaccaagtgactcgggcgagtgagggaagccaacaccgccacggcgtgaaagatgacgggtatttgtgataatctgccgccagttacccttccaggactaaaccgtgagcagtacgaaaggaccgcgcccatctgggcgagcaaccatcaatgatgtcgctaagagtgctaaaactggcaagactagcgtctctcgctatttgaatggcgaacataacctgctgtccgatcgattaaaactgcgtattgaagaagctatcgccaaactaaattatcgacctagtcaggttgcccgcagcctgaaaagggggcgaacccgattgatcggcctgattttggcggatatcaccaacccttattctattgacgttatgcgtggtattgaagccgcttgccgtgctcatggctttaccctgctgatgtgcaataccaacaatcaggtcgaacaagagcagcattatctgcaactgttgggcagttatcaggtggaagggattgtggttaatgccgttggaatgcgggaagaggcgctgtcgatgctgcaacagtcgcgcctgccgatggtgttgatcgataggaagatcgccggtttctcctgcgacatgattggcttgaataatgccgaagcggcaatcatggctaccaatcatttagtcgagcaaaactatcagtctattttatttcttagcgagcctttggggctggtcaatacccgccgagatcgtctgatggcgttcaaagcagcgatggcggtgcatcctgagcgagcgtcggaacacgctgaagtcacgctggaagatagtcagcgaatcaataacattgtcgaccagttcaaccagaaacatggggataaacgccgtgccattttagtggccaacggcagcctaacgctgcaactggcacgcaccttacgccacaataatattcagtggggcatcgatattggcctgctcggatttgatgagttaccttgggcggaactggctggcgtagggattaccacacttaagcagcctacttatcaaataggttacgccgcactcgaacaattagtgaaacgcatgcaggggagtgatgaacctccggctgatatcatgttttctggcgaactggtgatacgcggctcgacacagctttagtccgtcacttttggctcgtcacaattcgataaacacagcggcgggagccagataaaatatgctcagtacgctcaaccggtacttgtaaagcctgctggaaaacctctaactccgcgcgacaaaagccctgacaactggtcgcagcggcgcaaatcgggcaatggttttcaatcagtaagatagagccatcttcctgcatttcccattcggccatatagccttcgcgcgtacgaatagccaccaggcgctccacccgttcaccaatattactggctcctttcatagcctgaaagtattgatcgcgggtttcctgttcgcgggtatcaatcagcaaattaagggcatcttcacctaacttagtgcgaaccatacgcagtaattgcacggttaattcgccgtgagcatcgggaaatcgcgcgtggccagcatcggttaattgccatagttgaatcggccgtccgacgcctttagcctgtgcgaccgcaatcaccagaccttctttggccagcttgacgaactgctgacgcgccgcttccccggtggttccaaggatcttgcccgcatccgttgcctgtagtgggccgcgggttttcagcagcatcagcaagcgctcggagacggattgcgtgcttattaccccatggtcggtggtattcatattactcccgatattaaaaacacattggcatttaccaagcatatacttgacttattaaccctgcacggccacagttattccaagttaacgcttgtttaactcagtctatcatcaaatcttactcaacaaccagtcgtactggttaggataaccactgtgctaatgaatgatgcgagccgctggagcgatctattctccggggaaaatgcggtttttgcctttgcgctgtcggcgggtgtcgcgttacacgccattaatatttatatcgtgacaaccattctaccttcagtggtgctggatattggcgggcttaatctctatgcctggaataccacgctctttgttactacgtcgattcttggctcggcgctctccgctcgcctgttaagtcgctatggcccacgcgcggcctatagcttagccgcttcggcctttatgctcggcagcctgctgtgcgctattgcgccaactatgccgatgatgctggtaggccgcgcagttcaaggacttggcggcggttttctgttcgctctctcctacgccatgatcaatctggtcttcccgcaatctctatggccacgggcgatggcgctaatttccggaatgtggggcgtagctacgttgattggcccggcaataggcggcgtgtttgcggaaatgggggcctggcgtttagcgttttggctattgctgccggctacactgctgtttgcaatattcacctggagaattctaccggcgggaacaaaacgtaccgaaccgtcctcatccctaccgataatccaactgatactgttgacgactattgtactaaccgtttccgccagcagtattgccaccgatttgcgctatagcgctgcaggcattaccgtcgctgccctgctactcacattgatgatccgcatcgagcgccgctccaccattcgtttattaccgcagggcgcactgcgtctaggttcgccgttagcggctttgtacatcactatgtcgttactggcgcttaccataaccagtgagatttttgtgccctacttcttacagactcttcatggccaatcgccgctggtttccggctatctggccgccacaatggccgcaggctggacagtggcggaagtactgagctctggctggaagaaaaacgggataagcttggcaattattagcgggccaattatcgttttactggggttgatcgctctggcgattttgctcccacacagatctgtcggcgattggctaaccctcgcccctatcgctctcgctctgacgttggtcggttttggcaccggctttggctggccgcatttgcttacgcgcattctacaggtcgcagcggatgaagataaagacatagccggtgcctctattactatggtgcagatgtttgctaccgctctgggcgccgcgctggcaggtttggtagctaatatttctggtttaaacgatcccggtggcgttgccggtgcagccaataccgcatattggctattcgctctatttgccatcgcgccgctactggcgattttcaccgcaatccgctgtgcggccattcgtcagccgaccgcgactcttgccacatccgaactgcactaactcatagcccgtagacgctggtcatacccagacagccattactccttgatctctagggggcaatggctgttatgctggctgagcttgaaacttacttattcttagttagccggagtgtgtaatgaagccttctgtcgtgttgtataagcccctccctgccgaactgcgccaacgtttagagcaacattttaccctacactgctttgacggcctgacatcggaaaactcgcaaccattcctttcagcattggcaaacgccgaaggcattattggttctggtggcaaaatcgacccggattttctcgataaagccccacgcctacgcgccgcctccacgatttctgttggctatgacaatttcgacgtcgaggcactcaatcagcggggcatcgtcttgacgcacactccaaccgtgctaaccgaaaccgttgccgataccatcatggcgctggttctggctaccgctcgacgggtagtggaagttgctgaacgggttaaagccggcgaatggcaggataatattgattccagctggtttggcgtcgatgtacaccataaaaccataggtatcttgggcatgggtcgtattggtctggcagttgctcagcgcgctcatttcggttttagtatgcctgtgctctataccagccgtcggtcccatgcagaagccgaatcacgctttaacgcccatcgttgcgatctggatactttactcgctgaatcagatttcttgtgcatcaccctgcctttaacagaacagacgttccatatgattgggccggaacaattggcaaaaatgaagtcaagcgccattctgattaacgcggggcgcggttcggtagtcgatgaacaagcactgatagacgctctgcaaaacggtactattcacgccgcagggctggacgtttttgagcaagaaccgctgtcacaaaactcgccgctgctgaagctcaataacgttgttgccctaccgcatattggctccgctactcacgaaactcgctacgccatggccgcctgcgccgtagataatttgatcgccgcgttaaccggcacggtgactgaaaactgcgttaacccactcgttattgaaaaatagccaagagagatagccgctacccaaataacgtcaatcaaccgaaatggcctataattgcttataggtcagtcggttattttgacgactgatgataagaaagccccctcatccagccttctcctccctgaaaaaacaatatgaggatgaggctatttttccaccggctgacacacttaactcgcctcaaaccctacaaaatcaaacgatcaggaaggcgcgtcatgaaacgtctcacactgcccttattgttagtattttctcccgcagccctagccacctggacgttgcagggcttccctgcattttccgagcaaagcaacggtattttcagcagcgcggcctcgctaactaaaggccaatatccgcttaaattttatcaggataagcaatgctggcagccaactgataccgtcaaactcaatcaaaccttttctctacaggcttgtgataatcagcctgaaatcatgtggcgactatttcgagatggtcagtatcaggcacgtatagatacccgcagcggtacgccaacgctgacgctgagcttaaaacagcccgttgttgatgaatcccaagccgttacccatatttgccagcgctggaacggtcaacccgtaaccgtagacgtcagccagacctttgccgaaggggaaaaactgcgtgatttctattcgggccaaaccgttatcgtcgcaaacggcaaaatcacgctgcaaccggcagagcaaagcggcggcctgttgttgctagaactcgcgcaaactcaagggcctgctccatttagctggcaaaacgccacggtttactttgcattgaccgatcgttttaacaacggcaatcctgccaatgaccatagttatggccgcagaaacgatggcatgcaggagatcggcactttccacggcggcgatttggccggattaactcagaagctggattatttacagcagcttggcgtaaacgcgctgtggattagctcaccgctggagcaaattcacggctgggttggcggcggcaccaagggagatttcccgcactacgcctaccacggctattacgcgctcgattggacccggctcgatgccaatatgggtgatgaacaggacttacgccaactggtggatcaagctcatcagcgcggcatccgcataatatttgatgtagtgatgaatcatgtgggttacgccactctggcagatatgcagagcggccaatttggctcactgtatttatccgcagaacaggcggagaaaacgctgggcaagcactggaccgactggaagccaggcagcggccaaaattggcatagtttcaacgattttattaatttcagtgataaatccagttgggataactggtggggtaaaaactgggttcgcaccgatatcggcgattatgactcacccggttttaccgatctgacgatgtcactggctttcctcccggacatcaaaaccgaatccacacaggccagcggtttgccgctgttttatcgccataaatccgatacggcagccagagaaattcccgcagctacgcctcgggattaccttactcattggttaagcacatgggttcgagattatggcattgatggatttcgagtcgacacggccaaacacgtagaaaaagcggcttggctgcagctcaaacaacaggctacgtcagcattagcagaatggaaaactgctcatcccgatcgggcgctggatgatgctccattttggatgaccggcgaggcttgggggcatggcgtaatgaaaagcgattattatcagaatggttttgatgccatgattaattttgattttcaggatcaggctaaacaggcgctggactgtttctcaaccattgacagcacatatagccaaatggctgaaaaattgcagaattttaacgtactgagctacctttcctctcacgatactcgccttttctttcgcgatgatgcggctcaatcattagcaaaacagcggcgcgccggagatttgctgctgctggctccgggagcgattcagatcttctatggtgatgaaagtggccgagaatttggcccaaccggctccgacccgctgcaaggcactcgctcggatatgaactggaatgaactgaacggctcgaaaggagcgctgctggctcactggcaaaaaatcagccagttccgcgcgcgtcatcccgcgattggttccgggatacaacagtcacaacaaactgctgattattatgcgtttagccgtcagcatttagacgataaagtccttattgtctggacgggggataaaaaacagtaaaccagactattatcctgacatatcgagttttattgatatatctgcgcacaaggtagaattatgggtacgttgcacccgcaattatctggctgtatggtgctcctttacctccgataacaattagtcagcatttatgaagttttcactttttggcgataagtttacccgctacgcgggcattacacggttgatggatgacctgaatgaaggattacgcacgccgggcgctatcatgcttggcggtggcaatccggctcaaattcctgagatggatgcctacttccggcggctatgtcaggagatgctggataaaggacagctcacagaggcgctatgtaactacgatggcccgcagggtaagaatctgctgctaaacgcgctggcaaaaatgctgagtgatgagttaggttggcaggtcgaaccacagaatattgcactaacaaacggtagccaaagcgcgtttttctacttattcaatttattcgctggccgccacgccgacggatcgctgcgtcgggtattattcccgctggcacctgaatatttaggctacgccgatgccggtttggatgaagggctgtttgtttcgactaaaccgaatattgagctactgccggaaggccagttcaaatatcacgtcgacttcgatcacctaaagattaccgatgatatcgggctgatttgtgtctctcgaccgactaatccgaccggaaacgtcattacagatgaagaattaattcgtttggatgctctggcacagcagcatgatgtgccgctactgatcgataacgcctacggcgtgcctttccccggtattatttttagcgacgcaacccccctgtggaacccgaatattattctgtgcatgagtctgtcaaagcttggcctgccgggttctcgctgtggcatcgttgtcgccgatgaaaaagtgatttccgccattacgaatatgaatggcattatcagcctgtctccgggcagcatggggccagcgatagcggcagaaatgattcaacgcggcgatctgctagacttatccaacaatgtaattcgtccgttctattctcaacgcgtgcagcatactcttgaaattattcggcgttatcttcccgccgaacgctgtctgattcataagccggaaggcgcgattttcctatggttatggtttaaagacctgccgattaccacggaaatactctatcaacgcctgaagaaacgcggcgtattgatggtacccggccactacttcttccccggtttggaacatgattggcctcatactcatcagtgtatgcggatgaactacgtgccagacccagaacagatcgaaaaaggtgtcgcgattctggcagaagaagtggaattggcttatcaggaagcgcgctaacaacgatgaagcgcggagagaaataaggcgatgttcgctatcggtatagtgagcagcaatcaatatagtaaacactggcatagcaaaactgcgctaggtggctgaataacttaacttctctctcaaaccccaaagaacaacctcggttgtcctttggggtatttagcgacctaaaagcgctacaacgtccagaacagtacggccagtatctgcggagacataatccttaggaacattgctagcggatacacggtggcataagacagcgccgcagcaccactggttgggtgtaagccattggcgaaagccagcgccggaggatcggtcatagaacccgccaacatgccgcatagcgtcaggtaattcattttagtgagaattcgcgccagaatcccgacggttagcaggggaatcgcggtaatcatcgcgccatagccaatccacgccagcccatcgccataaagcagcgtattaataaaatcaccgcctgatttcagcccaaccaccgacaggaaaaggactatacctagctcacgcagcgccagattagcgctaggcggcataaaccagtacagtttaccgatgctaccgatacgccctaaaatcaatgcgataaccagtgggccacctgccaatcccaagcgtaaagccgcaggaaaaccgggaacaaacagcggtattgaccccagtaacacccctaatcctacgccgataaataccggcaacatttgtacttgttgcagtttttgttgagcgttacctataaccgcagcgaccgcctcaatggattccggtcgccctaccagatttaaaatatcaccgaattgcaggctggcgttgttgctggcgactagctcgataccggctcggtttaaccgagtaatagcgacgtcgtatttctgtttcaggtttaaatcgcgaatttttttgcctaaaacagcctcgttggtcaccaccatccgtgccgattgcagcgcgctgccggcggtggaaagcgccacatccacctcttcaccaagcactaaacgcactttttccagatattcgcgctgtccaactaaatgcaggtaatcgcctaactcaattaaggtagcaggcagcggtaccatcaataaatcaccgcgtttcaggcgagagcacaccacatcatcgctatttaacagcggaatatcctgcatcgccaagccatccaaattaggattgcgtaccgcgacgttcatggtttgcagcagttcacggttttgtccgctcctgctatcaaaatctttagcttcacgatcgacatttatcttaaatcctagccggatcagccacataaccaacagaatcccgcagataccaaaaggataggccatggcatatcccatccccatttgcccaaccaactgaggagaagatcctaaatccgtcaatacctgctgagccgcgcccagcgccggagtgttggtaactgcaccggaaaaaataccgagaatgatcggtagaggcacgttgaaaagtttgtggataaccgccgttaccagacaacccatcactaccattaatatggcgaaagcattcaggcgcagtccggaaactcgtagagaagagaaaaaccccggcccaacctgaataccaatggtataaacgaacagaatcaggccaaactcctgaataaagtgaagcatgtcaccgttgagactgacctgataagtttgggcgaaatgaccaacaataattccgccaaataatactccaccaatccctaacccaacgccatatatcttccaattaccgatccataaccccaatacggcgaccagcgccaacatactgacggtaagggcgatatcagtcataaatcacttccttgcctaagtttaaaatccggtcaaccgacctcggtcttaaattcttacaattagtagggattctggcagaagggcaacgaagggactgtgggatgcaccacaaaatgcgccggataacaggaatgtttccggcgccaaaagctagggaggagggttttactttttttattatctgcaccggctcccggaagggagaccggtgcgagttgggtcactgcaaattactgctgaacggtttctgcgttatccaatgccgggcgatcttctaccggacgaccgatagtaatacgctgtggctggagtgcttcaggaacctgacgcagcaagtcgatatgcagcaggccgttttcaaactgcgcgttatcgacgttcaggtgctctgccagagtgaaggtcagattaaactctttacgaatcagaccctgatgcagatattccacctgtttctccacgggtgctggcttaccacgaaccgtcaagcgagggccttcaacttcgatctccagttcactttgcttgaacccagccagcgccagagagatacggtagtggttatcatcacttttttcgatgttatatggagggaacccctgtgcctcggtagaaccctgcatagtgctcgccaatttatcaaaaccaatccactgacgaagcagaggtgacaaatcataattacgcatagtgttaactccttctttgaagcgaggtaataggctgccacggccgcgttaataactttttttttcaaatcaaagtctgctgttaaataacaaacaggcgttattaacccgtgacaagttggcccccgattacggcagaccaaactcttgattaataatgtgcctaatgcacattatttaaattttatttaatctcaatccgacgaggtttcatactttcaggaacaattcgttccagatcgatatacagcaggccattctctaaattggcgcctttaattttaatgtgttcagccaattggaatttgcgttcaaagtttcgttccgcgatcccttgatataaataagtgcgctgtgctggagcttctacgtgagaaccacggacaatcaacaggttgtcctgagtgactatctccagttcctgctcggcaaaaccggcaacggcgatagcaatacggtagttattttcatctaccagctcgacattatacggaggatagccgccgttattctggctctgaccagtttctaataagttaaacagacgatcaaaaccaatagcagagcggtataatggagcaagatctgaattacgcataacaactgcctcctaaattcattagcaaggttaaataggtcttccttaatggacagactcttggccagaataccctgacggcatattctctctcggcctgataataagatgggatcgaattttttcatttcaactgtcaaaatgaaaaaattttttttaactaaagatttttgctctaaaaacagagttatcgcatacactgaattgggagcgccgccacatctgcgtgtaattattatattaaagcgacagcaaaatgttataactctgagagatcgcttttatgttggctgacaacctgaacactgccaaatgagatgtaacgatatgataagagctaccgttcttcctatggtcactggctgtaccctgctgtttaccagcggctgttccagcattatgactcacaccagtagcagtcagggctactattccggcacccaggctaacgtcgccatgctcaaggatgacaacaccggctgggcgttgcgcccgctgctagccgttgatttacccttttctgccgtaatggacacgctatttctgccttacgattatctgcgttcagataacgaccctgcgcccggctcgccccgagaacgtatccgtcaggaagaagcgcaaaatatggccgccagcgctcaccccattcagtgaatttattatttatcgattaatataggacttaccggttaatgatcaattagccggcttcaaccacaaaaatctgcgaccaaccgtcgacctcccgcatataggcaactttcgtcccatcaggggaaaagaccaccgcgtctcccaatggggggaccgcggttcgctgagttagccgctgaacctggccgctgccaatttcgcaacacaccacactgttatctctgacaaaagcaattctgtcgcccttaggactccaactgaaagccgattgcacgccgtgcccgccatgagtcaattgccgtgattcgccgcccagcggagaaaccagataaagctgtacgattcccgcatcatccctcatcaaacaggcaatggcgctaccgtccggggaggagcgtaaccagtggcgtggcgtgatcgccagccctggatatctgcgtttttccgtataagtcaaccgccgttgatttacccccaacggaggcgctggaagacggtattcatctccctccaaggggctcgaacctgctcgggcgaattctcggtttttttccggtaaatcaacaataaagacttcaggcagtttagaaccatccgccgcgaccgtatcgccaataaacgccagcgcccagcgttgtcggctgccgtcggctttcaagtagccctgtttgccaatccagccttcttcataagcgcggttgatttcatcactccctggccggggcattgacgtggtacggctgaccagaacgcagaaatggctgccatcatattcacgaggatgatgctttggcggattaaccccatgcaacggcacggcaacgccgacgttacgtaaatccagcgcgggatcgcgttcatgcagcacatggtcgttataggtaaaactcagacgcgagccgtcggggctaaaaacgtggacatgagtcccgccacgcaaagcgccgggagtataaggcgcagtgatatccatagcgtccaacgtaatggccaactcccgatccggctcgctgacaatcacaccgcgccgatgatgaaaatcataatgccattggctatccggatgttccgggccgtggataaatacgtagcgagagggattatcagggctggcggtcactacaccaacgtgagcgccgtgctgagcacgataaataacctcaatcactcccgtattacaattgactctttcaatagttaaaccggtgaaagaagccccgtttggccggacgtcatataccagccactggctgtccgccgtccagacattgatattggtgagctgatgacctcgaggatcgaaagttaactgtttttcctgatggctcatatcgcttctcgctgataacccgtatagcgctcatcctgccccattcgccgcactccgtcatccgcgatataccatccgcgcgacccaacgggcgatttattcaccttcgtcgcttccaatttagaatttaatgtctaatatagaatttaaagtacaaatagattgagtataaatagagatacctatgctgagccgctatcacaccattgccgatgctatcgcgatcctttttgccccctatgccgaagtcgctattcacgatatggccagtcagacgctggtttatatcgccaataactattcacatcgtcaattgggagaggattccaatttaagcgagctggcgttcgaccaaagtgcaaagctgctgggaccttatcaaaaacgcaattgggatggtcgtcagcttcgttcaattagctcggtgctgcgggacgatgacgggaaaattatcgggttactgtgtatcaatctggatattaccgtgtttgaaaacgccaaaatggcgttggatatattcctcaataacagcgggttacagcctcaacctgcagttttatttcaggatgactggcaggaacgtatcaatacttttattcaccagtggttgcagcaacagcagctttctctctcaacgctgaataatcctagccgccgcgccttagttgaagcgctttatcagcacggcggatttaaaggcaaaaatgccgcgggctatgtagcgaaaatcctcggaattggcagagcaacggtttacaactacctaaaaaataataaggaatccctatgagttcgctatttgatgccattcaggaagcccatcagattctgcgtccgcaggtacgcattacgccactggattacagtccgttgctctcgcagcacactggttgtgaggtttatctcaaatgcgatcatcttcagcacaccggttcctttaaatttcgtggtgccagtaacaaactgcgcctactgagcgaagaacaacgccagcgcggcgtgatcgccgcctctaccggcaatcacggtcagggcgtggcgctagccgcaaaactgctgggcgtcgaagccactatttatgccccagaacaggctgcagccatcaaattagacgccattcgcgcgctgggcggaaaaatcgagctggtagccggtgatgccttaaatgcagaactggccggagccaaggcggctcaggaacaggggaaagcctatatttccccctacaacgacgagcaagttatcgccggacaaggcacctgcggcatggaaatcgtcgaacagcagccgaatctggacgcggtttttgtttccgttggcggtggcggctatatcgccggaatcgcaaccgtattgaagaagttgtcgccaaatacgcggattatcgcctgttggccagcgaatgccaccagcatgtatagcaatctgctagccggcgaaatctatgaagtggaagagcaggaaacgttgtctgacggcaccgctggcggcgtagaaactggcgcgataactttcccgctatgtcaaaaactgatcgacgataaagtactggttaccgaagaagagatcagacaagccatgcagttaattgcccgcagcgaccgctggatgattgaaggggcggcgggcgtggcgctggcggcagcattgcaacaggcaccacaatggcaaggcaaaaaagtggcggttgtactgtgtggtaaaaatatcgtactggaaaagtaccttaaggccgtttcctgatgcttatcctcaataaacagcaaatactcgacagtttcgccgccgatcgtaccactttactgctaaaacaaggatttatcgcgttcagccagcagcaggttcagatgccggcggtacagcatttgttattcacacaggctaatggcgattgctgtatcaaaagtggctatctggaaggagacgacagttttgtcgtgaaagtttccagcggattttacaccaatccatcattaggattatccagcaatcaaggtttgatgatggccttctcggccaaaaccggtgagccacaggcgctattaatggatgaaggctggctaaccgctctgcgcaccgcattagccggtcgaattgttgccgaactttgtgccccaaaacacattacagctattggcattgtgggcaccggcttacaggctcgcttacagttggtgcacctgaaggccgtaattaattgtcgggatgtctgggtttggggacgaaatcctgaagcattatacgattatcagttatttgctgaatcagaaggttttcgcgtacagatcacgcaaaatgccagccagttagcggaaaagtgtcaatttatcgtgacgactacgccgagccgcgaacctattttgcgggctaaagacattcaacccggtactcacatcaccgcagtcggcgctgatgctactggcaaacaagagttggaaatccaacttgtggccaaagcagataagattctggtggattcattggcgcaatgccgcgcattcggtgagatttcccatgcttttcagcagcagttacttcaggcaacacccattagcgagatcggtgaagtattggcgctaaataaacccgttagagaaaatgatcgtcaaatcacgctggcagatttaactggcttgggcattcaggatgtacagatcgtaaaaagcattctgctttcctgcccctgagcctcagaacaggaaggggccactaatggcccctaaagcgttttttacgttatttagcagcaaattaacgttgattcagcacaaacttttcaatggctagcgctacgccatcttcttcattagttgccgtcacgtactgggcaatctcttttagctcgggaatagcattccccatcgccacgcccaggccagcatattcaatcatcgcgtaatcattactctgatcgcctaaagtcatcacattttcctgtgcgatgcctagatgctccgccagcattttaacaccggcacctttatcaacgcgtttacttagaatttccaggaagtaaggcgagcttttcataatagtgaacttctcgaacacttcggcaggaatctgtgcgatggcgcgatccaaaagctctggttcatcgatcatcatcactttagggaaacgcattgttgggtccatttcactgacactacggtatttcaacgaaattcccgtcagaacagtttcgtgaatggtgtacttactgatgtctttgttagcggtatacaacgtattgtaatcaaaagcgtggaaatgcacgcctaactgccgcgccagagcttcgaaataaagataatcatcaaagcttaaggtttcctgcaacacacattcaccggtcgcggctttttgaactaatgcaccgttattgctaatgcaataatcgttgctgttttccatattcagttcgcgcagatattgagtgacaccgatataaggccggccggtagccagtaccaccaccacgccttttttctgtgcggcctcgatggcctgctttactctaggggtaatttggtgaagcccgttaagcagcgtaccgtccatatcaatcgcaatcaattcaatagccatgacaccctcatatatttacatcgtcttgcatcatgctaacgcgattcagcgaacgaatgctagcaagggtttactcaaccgcctgcttgcctatgaaacctggctcgaagcagcaatattggctgcaaatcgcgcctaaactggcttttcaggcaaaaaaaaaccagagacagtcgcctgctccggttttcttattgccgcaatttatcagatatcgatatttgctgcttttaaggcgttttcttcgataaaggcacggcgtggttccactgcatcacccatcagagtggtaaacagttggtctgcggcaatggcatctttcaccattacgcgtagcatacggcgactttctgggtccatagtggtttcccaaagttgatccgggttcatttcccccagacctttataacgctgaattgccagaccacggcgggattctttcaccagccaatccaatgcttcttcgaagctatcgaccgcgaaacgacgctcgccgcgctcaacgtacgcaccttcttcgatcaggccacgcagtttctcacccagcgtacaaatcttgcgatattcaccgccgtgaatgaattcgaagtccagatcgtaatcggtatcaaccccgtgggtacgaatgcgcagaatcggctcaaacatctgacgctcacggttttcacgaacgatcgagctgtagctgctaccgtgctgttcattttcattcagcaagttcaccagagaatcgatccactgctgtaccgcttctttattgtctaaatcgtcttccaacagcgttggctgataaatcaggttattcagcagcgcacgcggataacggcgctccatgcgagtaatggttttctgcacgctgtagtgttcagcaaccagtttctccaatggttcgccagacattgctggtgcattagcgttgatatgcagagccgcgccatccaatgccagagacatttgatattgctccatcgcatcatcatctttgatgtactgctcctgcttgcctttcttcactttatacagcggcggctgagcaataaacacatggccacgctcaataatttccggcatctgacgatagaagaaggtcaatagcaacgtacggatgtgagaaccatcgacgtcggcatcggtcatgataatgatgctgtgatagcgcagtttgtccgggttatattcatcccggccaatcccgcagcccagcgcagtaatcaaggtagcgacttcctgcgaagacagcatcttatcgaaacgcgctttctcaacgttaagaatcttacctttcagcggcagaatcgcctgattcttacggttacggccttgtttagccgaaccgcccgctgagtccccttccactaagtagagttcggacagcgccggatcgcgttcctgacagtctgccaatttgcccggcagaccggccaaatccaacgcgcctttacggcgagtcatttcacgagctttacgcgctgcttcgcgagcacgagcggcatcaatgattttaccgaccacgattttggcgtcggttgggttttccaacagatattcgaccagcttctcattcatcagcgtttcaaccgcggttttcacttcggaagaaaccagcttgtctttggtctgagaggagaacttaggatcgggaacttttaccgaaactacggcgatcaggccttcacgagcatcgtcgccggtagcgctgattttcgcttttttgctgtagccttctttatccatatagctgttcagggtacgggtcatcgccgtacggaaaccaaccaaatgggtaccgccatcccgctgaggaatgttgttggtaaagcagtagatgttttcctggaaaccatcgttccactgcaacgccacttccacgccaatatcgtcttttaccgtagagaaataaaagacttttgggtgaatcgggtttttgttcttgttcaggtactcgacaaacgccttgatcccaccttcgtaatggaagtggtcttctttatcgttacgcttatctttcaacttaatggaaacgcctgagttcaggaatgacagctcgcgcaggcgtttcgccagaatttcatactggaattcagtattattggtaaaggtctggaaactcggccagaaacgtaccatggtgccggtttgttcggtttcaccgacaactttcagcggcccctgtggctcacccattttataagtttgctcgtgaactttaccttcacgacgaatgaccaattccaatttttcagaaagggcgttgacaaccgaaaccccaacgccgtgcagaccaccagacactttataggagttatcatcaaacttaccgccggcgtgaagcacggtcatgatgacctctgccgcggaaaccccttcttcttcatgcagaccggtaggaataccacggccgtcatcctgtacggatacggagttatcggcgtgaatagtcacctgaatttctttacagtgacccgcgagggcttcgtcgatagcgttgtccacaacctcgaataccatgtggtgcagaccggtaccgtcatcagtatcaccgatatacatgcccggacgcttacgaaccgcatccagcccttttaataccttgatacttgaggagtcataagtattcgacatcaacgtttctcgctcatctttaatcctgtggttgaacctctattttgccatgttccactcggaacatcttgcccttttcacctaccatgtcggttacttgttcagcgctaaccgcactgacaaaaacctgtgcctgggtggctttcaaacgctcagccaataaacggcgtcggccggtgtccagttcagaagcaaaatcgtcaagcagatacaggcaacgccgcccgctctgtcgggtgagaaactcaccctgcgctaaccgcagcgcgcacatcagcagttttagctgaccgcgcgatagcaaatcttctaccggcgtaccctcggcccgaatgcggaaatccgctttatgcgggccgacggcggtataggttagcgctctgtcacgctcaaactggcgttccagcaactcaccgtagtcgctctctttgtcccagccacgctggaaagagaaactcagggcgaactctggcaggaacagggcgcatgtcgcagcaatatctgcggcaatggcgtcactgtatgccgctcgccattcgctaatacgctcagccagcgggataatttcctgatcccaaggccgtatttgcgcatagcgattcacctggcgcagcgcggcgttgcgctgcttaagtaaccttttcaggttgctccaggcagtaaagaaaccgggttcattatgaaagcaaccccagtctaaaaaagcgcgccgaaacttcggcccgccgttcaataaggtaaaaccttctggcgtgatcagctgcattggcaacatttgcgccagctcagccactttatggccgtcactgccatcaatccgcactttactttcgccctggcgactcttgcttaacccaacggacaactcacgctcaccgccgtctacccgcccatgtaatacaaactcaggacagtcatggcgaatcactcttcctgcctgtaggctacgaaaagccctaccatgaccaagggtatatactgcttcgagtacgctggttttgccgctgccattggggccgacgagaaaattaaatcccgcggccggtgccagatctgcagattcgatattacgaaaatcttttatcagtaaacgcgtcaaagccatgaagctggttcttattcttatgatcgaggacgtcattatcgccggcagactggatgtgagcagagttcagcctcatccatgcaggcaaatagacagcccgataaatactacaaacgcattggcatgactacgtaagccgccgcctgactcgcgctatcttcaatctgtacgcttgaagtcgaatccgttagcaataggcgaacatcttcacatttcaaagcgttaagcacatccagtacgtagctgacgttgaaaccgatttccatttcctcgccttcatagctaacgtccagaatctcttcggcttcttcctgctcagggttgtttgccgtgatcttgagctgattatggctaacatagaggcgaacaccgcggaatttctcattcgataaaatagcggcgcgggcgaaggcctgcttcagcaaatcacagcctgcttccagcgttttatccggattcttcggcaatacacggcgataatcagggaaacggccgtcaaccagcttggaagtgaaaataaaatcacccacgtgagcacgaatgttgttactgccaatttgcagacgcagtggcgtgtcgccgccgtccagcaatcgaaccagttccatgacccctttacgcggcacgatcaccgaatgtgaaggcaaagtctggccaataggcattgagcacaccgccaagcgatggccgtcggtggctacggtgcgcagttcttcaccttcggtttcaaacagcataccgttcaagtagtaacgcacatcctgatgggccattgaaaactgggttgactcaatcagacgcttcatcgtggcctgaggcagcataaattctacctcactttgccagtcatccagattcggaaaatcagcggcaggcagcgtagacaacgagaagcggctgcgaccagaacgcaccagcaggcgatcgccatccagcgccacggtaatttcagccccttccggcaacccacgccagatatcaaaaaacttccgcgcaggcacggtcgttgcgccctgttcatgggagtgggacaaggcgactcgcgccaccatttccatttccagatcggtaccggtcagcagcaaagagccttccgtgacttgcagcaacagattgcccagaattggcaacgtcggacgtccacccagcgggctactgacctgttgcaggggttttagcagatgctcacgttcaatgataaatttcatagcgctaggaggataatgttctgattaagttagagaaatcttctttgatgtcgtgactttcttcacgcaactgctcaattttccggcaggcgtgcaacaccgtggtgtggtcgcggccaccaaacgcatcgccgatttcaggcaggctgtggttggttagctctttggccaatgccatcgccatttggcgtgggcgagccaccgaacgagaacgccgtttggagagcaggtctgcgaccttgattttataatactcggccactgtcttctgaatattatcgatagtgaccagtttttcctgtaacgccagcaaatcacgcagcgcttcacgcacaaaatcaatggtaatggcgcgtccggtaaagttcgcgttggcaatgacgcggttcagcgccccttccagctcacgaacgttagaacgcaggcgtttggcaataaagaacgccacttctcctggcagacgaatatcattttcatccgcttttttcatcaggatcgcaacgcgggtttccagctccggcggctcaatggcgaccgtcaaaccccaaccaaagcgtgatttcagacgatcttccacgccatttatctctttcgggtagcgatccgaagtcaaaatgatttgttgattaccttcaagcaaggcgttgaaagtatggaagaactcttcttgtgaacgctctttattggcaaagaactggatatcatcgatcagtaacgcatctactgaacgataataacgcttaaattcttcaattgcgttgttttgcaacgcttttaccatgtcctgcacaaagcgttcggaatgcatgtaaaccactttggcattggctttacgcgccatgatgccattccccaccgcgtgtaacaggtgagttttacccaagccggtgccgccgtagaggaatagagggttataggcaccacccggattatccgcaacctgacgggctgccgcgcgggccagctggttagatttaccttcaacaaagttatcgaaagtgtgcttagggttgacgttagagcgataagaaagctctggctgcgccggtgagctgtcccaactcggacgcatcggcgcactgcgaatcaccggagcggcgggcgcactgacgctggcggcggtaaccggttgattctgtgtttgcaccatgggtttgctgccaacttcaaagcgaagcaagggtacgtttgtaccgcagaagtcattaagcaaaccattgatattgtttaagtacttatcacgtacccagtccaaaacaaaacgattaggtgcgtaaagcgccagagtattgtcactcagttccgcctgtagggggcgtatccacatactaaattctgtggcaggtaactcatcctgcaatcgggcaagacactgctgccaaagcgaaagtgacacggcggactccactcgaacaagatcaataaaagaaagaaatcaggatattgtgtaaatcatcgtttttgacacacgccaattggcctgtagcaggccgaagcgacatgcgaaccgtttttacggttgtttttttacgattaacatccccccacgatcccagagtagagatcgcgatcggaatggcggatcatagcgcaaaaggagcaatagatcctccccttcctcacagattagatcctttttatccacaggtgtggcttgacaaacaagtgtaacccaccgcgccgcatttggttgagcacatcagcattaatcaagaaaaatttcagactttcctgaaataacccacagcctgcccacaatccgatcccctgatgagaacaaaggatcttgatgcgatccttgcgatttatcagggagtccgtataatcctcagccctacgtgtgatgcctgttttccagatggctttggccaaacggaatccttcggtaaacacgggcaggctccttggtaaactcccggtttggaaaacttccttactggcttgcgcaatgtgaattgactcaggactgtacaattattacaatcccgcttctttatatgttgcgattgaggcgtcggtggtcttcactccgagcagccaaacgcgtttactgaatcagtaataattttaagtttaggtagaaatcgctatgaaacgcactttccaaccgtccgtattgaagcgcaaccgtagccacggtttccgtgctcgtatggccaccaaaaatggtcgtcaagttctggctcgccgtcgtgcgaaaagccgttctcgtctgactgtttctaagtaataaagctaaccgactgagtggttaagctcgctttccctagggagttacgtttgttaactcccagtcatttcactttcgtcttccagcagccacaacgggctggcacgccgcaaatcaccatcctcggccgcctgaacgagctggggcatccccgcatcggtcttaccgtcgccaaaaaacatgtcaaacgtgctcacgaacgtaaccggataaaacgcttaacacgcgaaagcttccggctgcatcagcacacgttaccgtctatggattttgtggtgttggttaaaaaaggtgtggctgaccttgataaccgtgcgttgacggaagctttggaaaaattatggcgccgccactgtcgccaggctcccgcatcctgatcggcctgattaggggctatcagctcgtaatcagtccgctgttggggccacgctgtcgtttccatccgacgtgctctcattacggaattgaggcattgcgccggtttggcatgataaaaggcagttggttaacgctgaaacgcgtattaaaatgccaccctttgaacccaggtggcgatgatcccgtgccgccgaaacccgacgataacagagaacactaacgatggattcgcaacgcaatcttctcctcatcgcgctgctgttcgtgtctttcatgatctggcaagcatggcaagtggataacaacccacaaaccgccgcccagaccacgcaacagacttcgaacgcagctaacggtgataccgcaagccaggccgtgccagccagtggccaaggccaattgatcacggttaaaactgatgtgctgtctctgaccattaatacacgtggtggtgacattgagcaggctaacctgctggcttacccggattctctgggttcagacaaaacatttgagctgttggaaaccacgccagcctttgtttatcaggcgcaaagtggcctgacaggcaagaatggcccggacaacccggcaaacggcgaacgtccgctgtttgaagtggcgcaaaacagctttgtgctggctgacggtcaggatgaactgcgtatccctctgacctttaccggcaaagatggctcggtctttacgaaaacgttcatcgttaaacgtaacgattacgcaattggcgtggattaccacgttaaaaacgcctctgccgcaccgctggaattgacgttatttgggcaattgaagcaaagcatcaacctgcctaaacaccgtgataccggtagcaataacttcgcactgcacacttatcgcggcgcggcgtactcctctgatcaagataattatcagaagtatgctttcgataaaatcgaaaaagaaccgctgaatatcaccaccaaaggtggctgggttgcgatgttgcagcagtattttgcaaccgcgtggattccagcggctaacgaaactaacaccttctattctgccgatctgggcaatggactggcggctatcggtttcaaaggtgcgcctgttgtcgtacaaccgggtgaacagaaacagctgggagcaaccctgtgggttggcccggaaattcaggacaaaatggccgctatcgcgccgcatcttgacctgactgttgactacggctggctatggtttatctctcagccactgttcaaactgctgaagttcattcacggtttcgtcggtaactggggcttctccatcattgtcatcacctttatcgtgcgtggtatcatgtacccgctgacgaaggcgcagtacacttcgatggcgaagatgcgtatgttgcagcctaaactggccgcgatgcgtgagcgaatcggcgacgataagcaacgtatgagccaggaaatgatggcgctgtacaaagctgagaaagtgaatcctctgggcggctgcttaccgttgatcatccagatgccaatcttcctggccttgtactacatgctgatgagttccgttgagctgcgccatgcgccgtttatcctgtggatccatgatttatcggcgcaagacccgtactacatcctgccgattctgatgggtataaccatgtacttcatccagaagatgtcaccgactaccgtgactgacccgatgcagcagaagatcatgacctttatgccggtaattttcacagtgttcttcctgtggttcccagcaggtctggtactgtactatatcgtcagtaacttggtgaccatccttcagcagcagttgatttaccgtggcctggaaaaacgtggcttacacagccgcgacaaaaagaaataatgtgtatcggtaatcatctgtagtaatagcctaaggcggtcaattgaccgccttattcttttttagtagaaaccacttttacgccgtccaagagagagataaccatgagcgcaacggatacgatcgtcgcacaagctaccccaccgggacgcggtggcgttggcattttacgtgtttcaggccgtgccgtggcggccgtcgccgaggcagttttgggtaaattacccaagccgcgttatgccgactatttgcctttccgcgatgccgacggcaccacgctggatcagggtatagctctctacttccccggcccgaattctttcaccggcgaggacgtgcttgaattacaagggcatggtggccctgtaatactggatttattgcttaaacgcgtcttggccctgccaggcgtgcgtattgctcgcccgggggaattttccgaacgtgcgtttctcaatgacaaactggatttggcacaggcggaggctatcgccgatctgatcgacgccagttctgagcaggccgcgcgttcggcggtcaactcgctacaaggcgctttttcagtccgaattcatcaactggtggaagcactcactcacttgcgaatctatgtggaagctgcgattgattttcctgatgaggaaatcgactttctttctgatggcaaaatagaaggccagttgaacggcgtaatgcgtgatctggaaaacgtacgcgccgaggctcgtcaaggcagcctgctgcgagaagggatgaaagtggtcatcgctggtcgcccaaatgcaggaaaatccagtcttctcaatgcattagcaggacatgaagccgccattgttacagacatcgccggtaccacccgcgacgtgctgcgggaacatattcatatcgacggtatgccgctacatattattgataccgctggcttacgggaagcaagcgacgaagtagagcgaattggtatcgaacgtgcttggaacgagatcgaacaggctgacagagtgctgtttatggtcgatggcacaaccactgatgctactgaacctgcgacaatctggccagagtttatggctcgtttgcccgcaacattaccgattaccgtcgtacgtaataaagccgatgtgacaggcgagacgcttggtttaaccgaagtgaatggttactcacttattcgtttatcagcccgaaccggcgacggaattgacctgctgagagatcacttaaaacaaagcatggggttcaccagcaataccgaagggggcttcctggctcggcgccgccatttacaggcgctggaagccgctgcacagcatctggttcaaggtcatgagcaactggttggcgcacaggctggcgagcttctggctgaggagttacgccttgctcaacaatcacttagcgaaataaccggtgaattcagctctgatgatttgctgggccgaattttctcaagtttctgtatcggtaaataatcaaaaccgaatcgggctaagccaaatacagtgcttatcccgataatttatgatggcattttattcagaggccatcataaagatcaaagaacattgcaataagtggtgagtgagcactcaccacttacagagttctagctaataaaggcgctcaatcggcaaaagcatacttttacctcatctactccctatcgcgctgctgctattgcgcccttaaattaaggttatttataattgacggtgaaagtagccgtagtcatcagactgccagcagcaattctattctcggtttgatagaatctggccttatagggcagttgggttaaagtagagagactcccaagcggttgttctgtatcaaaaaccaaaggagcatcccgctcaactatttgaatgcccacccccgctgaagtagatgtcgaatccgctttgatgacgccgttgctacttccaccctgccagataatagtcgcttgaacccctccactacactgcacttcaatatcaaaacttcgctcaccgctagtgctgccgacacctttaaaggtatttttcaatacagcgcccattggaacatcaatttggggcgtcctgacttcacaggtttttgccgttactttaaaactgggaatttcgtagctaaataaaatctcatcggtattgaatcccttctcatcctgacgagctaatattatttttattggattaaccacaccagagtcggcattcttatcaactgatatataaaatttaccggtgaagttttttctgacaccgatccctctcatactaccaacattcatttcctgagggcttaaattatttggttggaggctccactttattttcactcctaacagattggtatcaaaataattatttatgccaatactagacacacccagcatagacttaacataaattccctgatgggttttccccggacaatttacgttaattccacttacagttttaactattattttcggtgaatgagccatatctcgacgaatagaaatatcatcaaaattaactacccctacagctctgttagcgttacatacaggggattttgcagctttcgctccatttaaataactacaaaaaataatagatataactaacatcaatcctgttttattatattttcggctaagaaaaatataattaatagaagcaaacataaaaaatccttttaataacgacactgggccacaagccgtaaaacacctgatttatctgacatctttgataaatctaactttgcataacagtgctgagcaggctcttttccccattgcacctttatttccgcattttctggaacggcgtttaagtacaactcaccttcatcaccaacaattccactgctatcaccgtttaccaacgtggcactggaaccaaaaggtacaggcttattatcactaagtaatgtcaccagtattcggtgcccctgccggacgcgaaaatcagcggcaaccaccgcgccacgggttggtacaacttgctgcactgactcatccaaatcgaggccgtcagccagtccttctgtatctaaagccacgcggttataggcataaggttcaatagacggaataactgcataacctctcgaatcagttttaatgcctctctgatttaatatttttgcttccgcagcgccttctgctctaaccaatgccaccgtctcccctaaagattgagagaaagtaataccatcacggtgagcaacaataccgcccgataatccgtaatttagcattctgctattatcgctatggctatatgccatattcatgcgtccagcattatgaacatattccaacgacgcgccggcgctggttgtcgcataattattactttgatccatgcggataccgtataacagcgcacgatcttccaaagcacttccattaaacgctacctgttgtgttccctgtccacgatcgtttctattaataccgtaggttagggttccatttgatatccatttatccaaaggaatagaaacgttaaaagaaacctgtttatccctggcggcggtattttcacgactatcgctataagaaaggtttaatccatatccaatacccgcgcgattaatagtatatccggcggataatgattggttttttccctgctttccccagtagtcctgctggttggctgacaaataaacactgcccaaatcacccattccctgatttagagttaactgtatttggctacgtttatttagcccagcgttaactgattttttcgctgtatattcgtttgcttccgcaaatgagtagtagcccgatgtagaatagcgatagccagctaacgtcagcgaagttcccgtggtttcaatactttttgcatattgaatacgataagactgcccttgtttacgctgattatctttcagtctggcatcggccagagtcgtatccagagagatagcaccgaaattacctaagccgagtccaaatccggtatttaacgcgcgataattatcagcagcctgtataccagaaagtaaactaactcgattagaaagcccataaataaaggagccttcaccaaaataaggctgataaatattggccccagaacttctgtaacggccaaaagttacctggtattttaattgcccttctctttgcatcatcggcactgaagagaatggctggacaaatttacgctgttgcccgttcttttcggtgatcgtaacctctaaatctccggaaccagaagttgaatagagatcggatataacaaacggcccaggcggcacataaccttcataaataacataattattttggcgaaccgttacccgagcgttggtttgagcgataccacgaataatgggtgcgaaacctcgctggcttcctggcagcattaaactatcggatgaaatggatgcacccgtgaactgtatactgttaaatacatccccgtcagtgaaagcttcaccgagaatcatttggctctttaaccgatgaatatctcgctgaacgtaactgttaatagatgagaaacggctaccccccttattttcttcagagtcatgactataggtagattggtttctgatacgccaggaaccaatattaattccacttcgtacatttaaaaaatagctttggtttttacttgttccattatgattatccgagccggttaaatcatagttcactaaaaatgaagacagcccctgttgccataaatgcgatgaaacggcatctctgacctgaacatctagcgcagcctgcgggatgctgatatccaaacgttgagaataaaaatcaaaaacaacagacgcctgaggaatatattctttaaggtcatcaataatatgttttgaaggaagatcactcagcgtcggagttgacgatatttttacgccaaagcggcggaggtcatccacggttaactgtggtaataatgctttatccgccgtctgaataaatctgacccgcctggtttctttctcatttccgttaagaaatataaccacctgatactcaccgggtaattgaccaccagagtttgaaaaagcgcttaaatcaataacagcttgctctgcatcacttaactccaacgcagataatcgaaaatggtcttgcgccagaaccgaagatgataagcataaaaaaaaggctgaaatgagcgtacaaaataataactttagcgcacctggatttatatttaacataatacttttcagcctcctgctgatcgttcatcttccttttaccgcagtttttgagtgatctccgggctgacaccaccgtagctattaatgctgctccactttacggcacaacccgctaagcccgatggaagtaagaagtgggaaacaccctgcggagctatcatgtccgcgcctgccaaagctttaccattaaccctaatttgtcctagagtgacgtaataattgctggggtttttcacctcaagctggttaccaatacgacgaaacatcaatgatttataagcctcttccgcatctccaatgatgcctttaggccggtaaaacagtttgatcctcgttttaaccgctattaataaagtactttgttcattttcttgcaccgaaggaatagatttcacattcaggtaaaacaccgattccctatcttccggtaagtgaccaccggtgcgcacaattctgagcgtactttctttacctgcatccaaacgaaataatggaggcgtcacgacaaagggaggtttctcaccttttgtattgctattgataaaggattgaattaaataaggctttgtttcatcggaattaattaccgagattgacgcctcttttttatttccatcatagataactcgtgttcctccaacggtgacacctgcccaagccggatatatgaataacattgataatatcaacgttattttcctaataaaaagacacaaattaaataaatcatttattttagatttcataacaactgtccatggtgttaattatccctggcaaatagccatcacaattcgcctgctgccagggaataaatttttatgaaaattaatttatatttttatttataagaaatgtcgaagtttagagtagcctctgcctttcctgctacgccagattgaccattagcgacataagcgactttaaaaggaatgtttacattagcgctattaatagcatccgggtattcatagctagctgaatttaaagatatttgatttccatctttgtcgtaaagacctataccgatcccttcagcgcctgttgcatctaattttaacaacttgtcgtcctcgagatctgccgtaccggtaaaagcgatagacataagaaccggagctccagtaacaaccgggcaacccgttaatttaatatcgaaatctctctcacttccgctaactttatcgcctttattttttatctcgctttttaaaaatgcgcccattgggacagaaagtgctgatccgccagaaatggtacaggttgtttccataattttaccggtaaattttaccgttccgtttgttaccccataagtcgtgctacttaaagacatcaacgtcccagtaattaatgataaaaccacccttcttttcatttacatctccttgacaaataaaataaatatccattttttaaacttcaaaataaaagcgtaaataatttatgacaaaaacaactttccagtacagatataaatctgtactgagataacaatgacaaataacttaaaaaaccagaataaaattttcgataaaaacaagaaataagagctttaaatagctcctatgtttttacttttaaataaccattagcgatttgtaaaatccatttactttcttaattaagattccatccttagccttttaattaatatcttttaaggagaaaattatatgggattttatgattcagatcaaactttaatctatttacagtaaaacaagaaaatgacttaagttaaattgtttttttacaataagttaaagtttaaagtaaataattctttacacttagaagttaattatctctaccttcatctggtctggcctgtgggaattttctgctttatttaattaataatctcccaaaacttaatcatctttgttatctattccgatataaaatgaaataacctactttattagtatatttatttcgagctattaacctgtttaaaccgaggtattatccttaaaaaaaccagataaccacattatttatatgtgtaacattagataatgtctcatctactcatgctaagaaaaccttgtttttcttcatttctcccactggatctaatagccgggataactgagtattcttcagttacatccaccgaggagccttgttttgatggcaatatcaatgagtaaactctctcaatccaacctttcctgattgaagttattgatggctgcactaagttactaagttactaagttactaagttactaagttactaagttactaagttactaagttactaagttatagacatccattttgctcaaagaatacagctctactgttgcaagccaattaacgtttttttagattattattagtacgatagaaacagcatgaccctttttattatcaaacccaagccttacaccaagtcactcttaggtagcgatatttttattgatattcagcaagataagcagacaaatacctattgtttaattcgagtaagcaagcctaatctagttcaagacaatattatttcaccaattaacaggagtgagtcatgtcacagcagccgcttaaacttgttaccttactgggtagtctgcgttccggttcctataacgctatggttgccaaagccttgccgcaattagctcccgctggagtgactatcgaggccctgccttctatccgcgatattcctctttatgatgctgatgttcaacaggaagatggcattccagctagcgtagaagccattgcagagcaaatccgccaggccgatggcgtgatcattgtgacaccagaatataactattcggttcccggcggtttgaaaaacgctatcgattggctttctcgcctacaaaaccagcccttggctggcaaacccgtgttaattcaaacgagttcaatgggccctatcggcggcgcacgctgccaatatcacctgcgccagattttggtcttcctcgacgctatggtgatgaataaaccagaatttatgggcggcgtaattcagagcaaagtcgatgaagagcgcagagaattaaccgatcagggaaccttggattttctgactaaacaactcgccgcgttcagcgcttatattgagcgagttagagtgaagtaagccccattttgcatcagacccggataaaaaaagccccgatctctgcagattcggggccatttttattactcgatcaaataattaatgatcgacaaaggcaatttttagcacaaagagtaacgccacaacgacgacgcaagggctgatttcacgccaacgcccggtgcccagcttcattacgcaatatgcgataaagcctaaagcgataccttcagtgattgagaagctgaatggcatcatggcggcagtcacaaaggccggaaccgcttcggttaaatcatcccatttcactcgagccaggctggatgtcatcagaaccccaacataaatcagcgcgccagcggccgcataagcaggcaccatcccggcaagcggtgagataaagatcaccagcaagaataggatacccaccacaacagcggttaaacccgtgcggccgccgacggaaacaccagaggagctttcgatataagcggttaccgaagaggttcctaccagcgcccctgctacagagctgatactgtcgacgtaaagcgcctgtttcattcgagggaacttgccgttttcatccgtcagacccgctttatctgttacaccaatcagcgtgccagatgaatcgaaaagattaaccagcataaaggagaaaatgacgcctgccagacccagattcaacgcaccggcgatatccacttggccaacaacgctggtgacgctgggtggcatggagaaaataccgtgatactgcacatcgcccaacgcccagccgatcagcgtagttacaacgatggataccagcactgccgcatggatattacgcgaagccaataccgcaatgataaagaagcctagcgctcccaataggacgctgtgggagctcagatcgcccacggcgaccagtgtgtccggatttgctaccactataccggcatttttcagacccatcatcgcgataaatagaccaataccactggtaataccgacacgaaggctcaatggaatgttggcaatcatccaatagcggatgcggaaaatggtcaatagcaggaaaccgattgcgccccagaaaatagcgcccatcgccacctgccatgaaatacccatagcgccaacgacgacaaaagcgaagaaggcgttcagccccatagcgggagccaaagcaacaggtaagttcgccaataatcccattaaaatactgccaaaagcggcgatcaagcaggtagtgacaaaaacagcctgcacatccataccggcaacccctaggatttgggggttaacaaaaacgatatagaccatggtcaggaaagtcgtcataccggcgatcagctcagtgcgcgccgttgttccatgttgttttagcttaaatacgcgttcgagcatcccctgctcaacatcaaggtttggtttactcattatcagagtccacaatagggggtgaatagtcggctgctatcctataacaaaacgcgtcaatgttgagccggatcacactcttttttagctatttttcgcagaggtttgtatcaaatagccccgtttttacggctactccacttaaaaaaaaccgctgattttgacgattttcttactcaatcgactgtatttattaaatttgttattaattactacgctaatcatgacaataaacgtcgcaatattaatccgtgacgttaaagtgggtttaagcgatttttacagcaaggattggtgctatgtctcagattcaatgcgtcatgtttgattgcgacggaacattagtagacagcgaagtgctatgttgccgagcctatgtgctactttttgcccattatggtattcacctttctctggaaagcgtcattaagcgcttcaagggcataaaactctatgaaattattgagtgtgtcagcgatgaatatcatttaaatcagccagttactgaaatggagagaatatatcgacaggaagtcgcgcggctgtttgacagtgaattgcaacctattaccggcgctaactcactgttaaaaaaaataaatgtgccagtctgtgtggtatctaacggaccggtcagtaagatggagcactcactgggactgacagatttacgccatttcttcgctaatcatttatatagtggctacgacattcagcgctggaaacccgatcccgccttgattcaccacgcggccaataaaatgcaggttcccgttgaagcctgtattttagtcgaggactcgctggcaggcgctcaggccggcatcgcggcgggcataccggttttttactattgcgccgatccccataaccagccaatcgatcatccattagtcaccactttttactatatgcagcaacttcctgagttatggcagctaaaaggctggaaactgacgaaaaattagctggcagacagcgccggtttattcctccaccagcgccatgttcgtttaattgcccgcgtttgcgggctgaaacggcgattgataacgttggccgatacatccaaagtcagacaaaaaacaaagtaaatcagggcaacgaacaggaatacctccatcgggtacaccatgctgcgattattaacctgagtagccagaaatgtcagttcattcacgccaactatataggccagcgaagtatcttttatcaatgagatccattgattgataaacgacggcaccatcatgcgcagcgcctgcggtaaaaccacgtaagccaatacctgccaacggttaaatccgagggataaccccgcttgccattggccttctcctatcgctagaatgcccgcttttaccgcgtgagccagataggccgaggcaatcagcgccagcgcacacaccacggtggtaatttccggaatatctacgccaaaaacgatcggtagtaaaaaataggtccaaaaaatcagcataataacggggatagcacggaaaaaccctaaaaccgccgccagtattccgccccatacgccccgcgacatcgccagcgctacaccaagaataatccccagagctgccgacgccgctcccgccatcaggctaatcgccagcgtcagcgccgcgccgcctaatgggccatcggggaacgttccccacaacaaatagcgccagttatccgcaataatcgtaaaatccatcttaatgccctcgcgcaatcaatcgctgttgacgccacattccccaagcctcaatcaacgcaataaccgagatatacaacagagtcgcgacaccgaaggcctgaaaggtgcgtaaagtttcagtttcaacctgacgagatgcataagaaagttccgcgacgccgatcgccatcgctaaagatgagttcttgattatattcatgtattgccccaataacggcggcatagctatttttagcgcctgtggcaaaacgacgtaacgcatggattgccaacccgttaacccaagagcgtgagcagcatttttttgccctttagcgacgccgctaattcccgcacgtaattcttccgcaataaaagccgtggaatacaaagtcaggccaataaatccggccagaaactcaaatgaaggccagggcagtccccatccgggcaaggataattcatggggtgtatttaaccactgcatccataatgcaggcagtaactgaccggcggcgaaataccagaaaaaaagctgtattaacaaaggagtattgcgaaatagcgtactgtaggcgattgccaaccacagaagcagttttaggtggctgtctctggctgcagccagtacaaaacccagcaaagtcgcagcgacgaccgtacaggcggagatccatagggtcagtaaaaagccgtcccatagccagccaatatagggtgaaaccagcaaccaatcagttaaccgatgaaaattcatatacttccgtacccgtcgggttatcgttcaaatccatttggcgcgactctccctgtcctgcaaataacgcccttgcgtaaaacaaataaccccgcattggctatcaatacggggcatccaggctcagtgcatcatcgcaaaaaatcaggctttaggctgttgatccaaaggtgcaaacttaaaatcaccgcgcggctgggcagatttggtttccggcccgaaccagtggttataaatcttcaccgcgtcaccgtctttctccagtttttccaacgtttgatttaccactgcagtcagacgatcctcacctttaggaatcccgatgccttggtattctttggtaatactgaacggagatatttcaaaatcagctttttgcgcggcggggacgttacccaataacccaactaatttggcatcatcctgagtaatagcctgaacgttaccattacgcaaagcggtgaaagccagcggcgtatcatcgtaggaaatcactttagctgtgggataacgctcccgcagggtaatttcttgtaccgtacctttatccgcgccgatacgcagttttccgatgtcttccggcgtttttagtacccctttgcgggctatgaatttctgtcccgtggcaaaataaggcaggctaaagttcacttgcttagcacgttcatcggtaatggtgaagttggcagcgatcaaatcaacttttttcgatgctaatagcggaatgcggttagctgggtttgttgcctttagctctagctttacgcctaaatctttcgctatcgcattcgccacatccacatcgtagcccaccagctttttactttgctcatcgatatagccaaacggaggattgctatcaaaaaccgcaattcgcaccacaccagcctgtttaatatcatccagtttatcggcgtgagccatgccggaaagcgtagccaaactggccaacagcgttaatgtgatcgcctggtgtttcatggatagctcctaagtgattgatgtgctgcattggctataagctatcaatttgttcttaggtcaggaaataatataaaacgctatatttataaccattttaaccaaacgaggaattttgagtatattgggcggggagtcagcgtttggggcaataaaaagcccggagaaccgggccgatagcgttactttttaccttcggaaagcaatttttccagatcgtccccgcccaaatgacggaaatcatgacctttgacgaagtaaaaaataaactcacagatattctggcagcgatcgccaatacgctcaatggaacgagcgcagaacagagcggttagcacgctgggaatagtgcgagaatcttccatcatataggtcattagctgacgaacgatgccttcgtattcctgatctacctttcgatcttcacgataaattcggatggcttcgtccagatccatacgcgcaaaggcatccagtacgtcatgtagcatttgcaccgtgtggcgccccagagattccaggctaaccaacagcggctgatgctggtgggagaatttctccaacgccgtgcggcaaattttgtccgctacgtcgccaattcgttccagttcggaaatagttttgatgatcgccataactaaacgtaaatcgctggcggtaggctgacgtttagcgatgatgcgcacgcaggcttcatcaatcgccacttccatcatattgacctttttatcgccttcaatcactcgctttgccagttcaccatcctggttatgcatcgcggtgatagcatcggtcaattgctgctcgaccatgccgcccatggttaacacctgggtacggatatgctccaactcagcgttgaactggccagagatatgtttattcagattcaggttatccataatacttcccgtacgtataagcctatcccaataggcgtaatgaacgcgatcccgttgcgggcgctctggccgaaagtcaatcttcgaccaaattaacccgcagggtcagtgtaatagcctaatcagtcaggcaatcaaccatagcggccggtgatgtaatcttccgtctgcttcatctgtggcgcagtaaacagggtgtctgtatcactgaactcaataagctcacccagatacataaatgccgtatggtctgagcaacgcgccgcctgctgcatattatgggtcacaatcaccacggtatagtcagacttcagctcgctgatcagctcctcaatacgcccggtagagataggatctagcgccgagcaaggctcatccagcagtaatacatcagggcgaatagcgataccgcgcgcgatgcaaagacgctgctgctggccgccggacagactgtaaccgctctgatgcagcttatctttggtttcattccacagcgccgctttggtcagcgcccactgcacccgctcatccatatcggcgcgggacagattttcaaacagtttcacgccaaaagcgatgttatcgtaaatcgacatcgggaacggcgtcggtttctgaaataccataccgaccttggcgcgcagcagagcgatatcttgcttatccgtcaggatattttcgccatccagcagaatgtcaccttctgcacgctgatccggatacagctgatacatcttgttaaaggtgcgcagcaaggttgatttgccgcagcctgatgggccgataaaagccgtgacctgatttttagcaatatccaacgaaatattcttcaacgcatggaatttaccgtaatagaagttcaaatcgcgaacctgaattttgctgttggtggtctcagtagccatactcatcaagacttctctcttttagctaacgcagcctaagctacgcttttgaatttgggtgacgtatcagtattttttcttcgcgaaaataacccgcgccagaatattcaatagcagaacgcacagggtaatcagcagcacaccggcccaggccaactgttgccattcggcaaaaggactcatggcaaacttaaatatggtaaccggtaagttggctatcggctggctcatatcggtactccagaactgattggagagcgaagtgaacagcagcggtgccgtttcgccggcgatacgggctatagccaacagtacgccggtaaggatgccggagattgacgccttcaatgtaattgcagaaatcatgcgccatttaggtgttcccaaggcgtaggccgcttcacgtaggctatccggtactagcttcagcatgttttccgtggttcgtatcacaataggcacctgtaacagcgccagcgcaataacccctgcccagccggaaaagtgctccattctcgccacaataatggtgtaaacgaacagaccaaccacaatcgacggcgcagatagcaaaatgtcattgataaaacgaatgatctccgccaaccacgatttgcgcccatattcagccagatagataccggccataatgcccagcggagtaccgataaccgtggcccatagaatcaggagtccactaccggcaatggcgttagccagcccaccaccagcggtattcggcggcggcgtcatttcggtaaacagcgccaaagacataccgtctacgcctttggtaattgtggaaaatagaatccacaccagccagaacaggccaaaagccatggtcgccagggataaaatcagcgcgaggcggttcttttgacggcgccacgcctgtttcttgcgacgagtttccagcaaggctgcgttagtttgcatatccatagtggtcatattagcgcccctctttcttagccagacgcagaatcatcagcttcgacaatgccagaacaataaaggtgatgacgaacaggattaaccctagctccatcaaggctgcggtatgcaggccagattcagcttcggcaaactcattggccagcgcagaggtaatactgttgcccggcataaacagtgagaagctgtcgagttggtaggtattaccgatgataaaggtcactgccatggtttcccccagcgcgcgccccagccccaacataacgccgccgatcaccccattcttggtgaagggcagcacaatacgccaaatcacttcccaagtggtgcagccaatgccgtaggcagactctttcatcatcaccggcgtttgttcaaagacatcacgcataacggaagcaatgtaaggaataatcataatggccaatatcacaccggcagccaaaatgccgatgccgaacgccgggccagagaacagcacgccaacgatcggaatacctgaaaggacattaccgacaggttcctgaaaatacttggcaaacagcggcgcaaagacaaacaggccccacatgccgtaaacgatacttgggatagccgccagcagctcaatagcgacgcccagcgggcgtttcagccagtttggtgccaactctgtcaggaataacgcaataccaaaactaacgggaacggcaataattaacgcaattaacgaagtgaccaccgtaccgtaaatcggtaccagcgccccgaattgctcggccggagcgtcccactctttggtccacagaaaggcaaaaccgaatttttcgatactcggccaggaggcaacaatgagggaaataatgatcccgcccagcaggaatagggttattaacgcagccagttttaccagcgcgccaaatatgatgtcaccgtgcttgctcggtgctttgatagtcggcttataaccagccatagactctcttctcatccgggtgttatttccctccccacacggggagggacaattaatggaaccaattacagttttttactgctttattcgtttctatcgagcttagaacaatgctttgcctgaactgtcttttatctgcgttttccaggctgcacgtacctgctcaaccacttcggctggcaaggttgcataatccagttcgctggcctgttttgcgccgtgggtgtaagcccagtcgaagaatttcaggacttcagtgcctttttcagcatttttctggtttttgtgtaacaaaatgaaggtagtagaagtaattggccacgcgccttcagcattctggttagtcaggtcctgagcgaatgttttgctccaatcaacgcctttcgccgctgcactgaagttttcttccgttgggctaacggctttaccatcagcaccaatgagtttggtgtaagccagattgttctgtttggcgtaagcgtattccacataaccaatagaacccggtaaacgctgaacgaaagcagcaatgccgtcgttacctttaccgcctaaaccggttggccagttaaccgtagagccagcaccgattttttctttccattccgcattcactttagccagatagctggtgaaaacgaatgaagtacctgaaccatcggcacgacgaaccactgcaatattttgatccggcagttttacgcctgggttcaatttaacaatagctgggtcattccactttttcacattgcccagataaatatcgcccagcgttttgccgtctaacgtcaattcaccggatttcacgcccggcaggttgactgccagcaccacaccaccaataacggtagggaactggaacaaaccgtctgccgctagcttgtcgtcagacagcggcgcatcagaggcaccgaaatcaacggtattggcgatgatttgctttacgccacccgaagaaccaatcccctgatagttcactttgttacctgtttctttctgataagaatctgcccacttggcatacaccggcgcggggaatgtcgcacctgcacccgtcaggcttgcagcagcgaacgcggacacagttgtcatagataaagtcgctgccacaatgctggctacggtggtacgcatcagtctcataatccctcctaatgggatataggtatcaaactcaaaattgttttcatcagattaagtatggtgcaggagggaaaataggacagtttagtgacagaaaaatgtatgaaatatgacagttttatgacaaatcagaaaagcagcggcaaaaccaccaacagtcataggtttcatcaagacattttgcctaccagccagaaatgaacaaaagcacaaagcgtgatttagaaatcgacgatgacaaacactatttaactaaccgataaaacgctatttattacagaatgtgaccagatactctcatagtatagtcaacgcctaaaattcagaatattagaggataaaaccatgagtatatctatggaaagagtacaacatgaaattagaaccattcatagcactgcagtggaccagaaaaaggtaacatcccaaagtgccaaaaagttatataacttaatgaaagaaataaaaaactcacctcttagctgtagtcaagggtgtaaaacaaacgcaatcaatgatttaaataatttaaataaaatactcactgaacagaattcaaagttggttaataaaaaaagcaaaggaataaatgcattactgaagaaaataaatacagcaaaagtagaagaaaacataataaataatagtatttatagcgttggaaaatcatcatacgtaccaataaataatgaattatatgcttcacaagaacatatctatgaatcaataagtgatgatattaatggcccagcagaacctatctacgaatcaataaatgatgatgttaatggcccagcagaacctatctacgaatcaataaatgatgatgttaatggcccagcagaacctacctacgaatcaatgtatcatgacgttaatagttcaccagaatccatctacaaatcaatgaaagcagtaataacaaataccgaaaaaggtacatattccaaaccatttgataactatagtgacaatatatatcaagagccattttatgataaacaaaaatacagcaactcgttaccaataaatgaattaaataatattgagaaatacatagacgaattggcggaaattgctgatgatattattttcatcagaacgccaccaggaatacgcccccccaacacctaataaaacccctgcatcaagtaataaagaacactttatacagattgttaaaaataataaaatacatatattaaaagcaaaaaattaatatataaataagatatagcgatatttacagtcagctcttagaggctaaaaaattttttgataatcaacgaagcgatacgcaatgaattttcattagtagataataagttgggtaaaaaaatgctgttcagcagatcgagatctcgctgaacagcatattcattagatttatagcccgaaattactcaacggtaaccgattttgccaggttacgcggctgatccacatcagtgcccttgatcagagcaacgtggtaagacagcagctgtagcggcacggtatagaagattggagcaataatgtcttctacgtgtggcagttggataattttcatcccttcactgtcggtgaaacccgcgtcctgatcggcaaagacgtacagcaaaccgccgcgagcacgtacttcttcgatgttagatttcagtttttccaacagatcgttgtttggcgcaaccacaataaccggcatatcagcatcaatcagcgccagagggccgtgtttcaattcaccagctgcgtaagcttccgcatgaatataggagatttctttcagcttcaacgcgccttccattgcaatcgggtattgatcgccacgtcccaggaacagagcatgatgcttatcagagaaaccttccgccagcgcttcgatagttttatccagagacagcatctgctcaatacgcgcaggcagagcctgtaacgcatgaaccacatcgtgttccaggctttccggtttacccttcaggcggccaattttagccaccagcatcagcaaaacggtcaactgagtggtaaaagctttggtcgaagctacgccgatttcagtcccagctttggtcatgagtgccaaatcagattcacgaaccaacgaagagcctgctacgttacaaatagccaaagaacccagatagcccagttctttagacaaacgcagggctgccagcgtatccgccgtttcaccagactgagaaagcgtaatcaacagactgtttggacgaaccgctgatttgcggtaacggaattcagaggcaatttccacgtcgcaaggcacaccagccaaggcttcgaaccaatagcgagaaaccatgcctgagttgtaagaagtgccacaagcgataatttggatatgctggacatcagagagcagcttatctgcgttcgggccaagttcagacagatcgatcaaaccgtggttcaaacggccttccagcgtgtttttaatcgccatcggctgttcgtagatttctttctgcatgtaatggcgataaacacctttgtcgcctgcatcatattgaacctgagattcaatttccgcacgttcgacggcgttaccgcttttatcgaagattttcacgctgcggcgagtcacttcaaccacatcaccttcttccaggaagataaagcgacgagttaccggcagcaaggccagctggtcagaggcgataaagttttcgcctacgccacagccgatcaccagcgggctaccggaccgcgctgctaccagcgtacttgggtcacggctatccatcactacggtaccgtaggcaccacgcagctgaggaataacgcgtttcaccacatccagcaaagaaccgccctgttgctgctcccagtgcaccagatgagcaataacttcggtatcggtctcagaattgaacttatagccgcggctaatcagcaattcacgtaatggttcgtggttttcgataatgccgttatgaacgacggatatatattcagaaacatgcgggtgagcattcgattctgaaggttcgccgtgagtcgcccaacgcgtgtgcgcaatacctgtgccaccgtgcagttccgtgctttctgccgcatcggacaaagcctgaactttccccacgcgacgcaaacgggtcatattacctttggcatcaactaccgacagaccggcagagtcatagccacggtattccaaacggcgcaagccttcgatcagaatctcagcaatatcacgttgcgctactgcgccaacaattccacacatcagtttaattcctatttaaggttctttgaaaagaacccattcgatgccagtgacctgattttccggattttccgggttccccgagcctgtagagtttggggattattatgttttgctcgatattctcagccgttagtcgctaaaaaaatcgagcaaaacattcctttcatggcatgacaccatgaaaggatattaatcagctttttttgaccggacgcttccagccttggatattgacctgcttaacgcggctcaataccagctcattttcagccacgttacgggtgacagtagtaccagcgccgatagtggcacctttttcgacggtaacaggggctaccagttgggtatcagaaccaacgaagacatcatcgccaataatggttttaaacttgttcttaccatcatagttgcaggtgatggttcctgcgccgatattcacatctgcgccgatttcagcatcgcctaaataagacaggtggccagctttagagcctttacccaaacgcgttttcttcagttcgacgaagttgcccacgtgagccccctcagccagctcagcgccaggacgaagacgggcaaacggcccaacggtacaggcgttatccaaacgagcatcttccagcacgctgtaaggactgatttcgcaatcatcgccaatcacgcaatttttcaacacacagccgctgccgatgcgaacccgattgcctaacgtcactttgccttcgatgataacgttggtgtcgatggtgatatcacggccatgagttaactcaccgcgcagatcaaagcgagcaggatctaacagcattacgcccgccagcagcagtttttccgcttgttcagactggaaatcacgttccaaagcagccaattgcagacggttattaacgccttcaacttcacttaggcgggaaggatgtacggcttcaatctttttaccgtcagcatgtgccagagcgataatatcggtgatgtaaaactcaccctgcgcgttgttgttatccagcatagacaaccagcgcttcagatcgcgcccgttagccaccagaatacccgtgttaacttcgttaatatcacgctgggcttcgctggcatctttatgctcaacgataccgaccacttcgccgttttcacgcacgatacggccataaccggttggatcgtccaacttaaccgtcagtagcccgataccgccttctggtttagccgcaaccaaacgctgcaaggtatccacagagatcagtggtacatcgccatacagcatcaaaatatcttcatcatcagagaaatgaggcgcagcctgctgcatcgcatggcccgtacccagttgctcagcctgtaacacccagtttaatgccggatcgctcagcgtctttttcagtaaatcgccaccgtgaccataaaccagatgaacattgctggaacccagcttcatcgcagcatcaataacatgctgaaccataggcttgccggccaatggatgtaataccttgggaaggtcggaatacatgcgcgttcccttgcctgcggcaagaataactacgctcattgtgctgttagacataagcaacctgataactccaattgaattgacggaagtaaacccgtttaccgataaaattactacatatttctcagcgaaaaacgccgcaaacccgcaccgttaaaggattgtttcacttagcgaaaatccaaaaaaaaagcgagagatactgtctgcgatcgacgacgttttaccacttttatcggctgagaaaacctaactctatcgcgcaataaaacacttattttacggcaagaaacaagataattcagaaagaaaacgccttcctcataatcaactctcgccgaaataagacatccccccaaaggctaacgatgcttttgcatcgaaacatcattaccgactttatatatccgataatagttatacggatcgcaccttattaagtaaggtttaacaatcttaaaaacacaatgaaatgaccgattgaataggaaaaaccgagaggcgagatcgaagaataaagagaatcatgggattcgcagaaaagaaaaatgccagtcagcttgcgctaactggcaccttattactctatcagtcaggccgctttaggcaacctgactcgataaagttacatcgctttacgggtcagttcgattacgcgtaatttcgcaatcgccttcgccagttcagcggatgcctgagcatagtcgacatcaccgtgggaattgttgatatgggcttcggctttgcgcttagattccagcgccttagcttcgtccagatcggttccgcgaatagcagtgtcagccaatacgatcacaacgctcggttgcacctcaaggatgccgccagaaagatagataaactcttcctcaccgaactgtttaacaatacgtatcatgccaggcttaatggcagtgagcagcggggcatggccagggaaaatacccagctcaccttcactacccgtcacctgaatcttttgcactacgcctgagaacattttcttctcggcgctcacaacgtccagatggtaagtcattgcagccatgtcaccctccagtcaacagcgttacagtttcttggctttttccactgcttcttcaatggtgccaaccatgtagaacgcctgctccggcaggtggtcatagtcgccattcatgatgcctttgaaaccacggatggtatctttcagcgacacgaatttacccggagaaccggtgaagacttctgccacgaagaacggttgagacaggaagcgctggattttacgcgcacgggatacaaccagtttgtcatcttctgacaactcgtccatacccagaatcgcgatgatatctttcagctcctggtaacgttgcagaatagactgcacgccacgcgctacatcgtagtgttcctgaccaacaaccaatggatcaagctgacggctggtggaatcaagcgggtcaaccgccgggtagatacccagagaggcgatttgacggctcaataccactgttgcatccaagtgagcaaaggtggttgctggtgatgggtcagtcaagtcatccgcaggtacgtaaacggcctgtacggaggtgattgaacccgtcttggtggaagtaatacgttcctgcaacacgcccatctcttctgccagcgttggctggtagcctaccgcagatggcatacgacccagcagtgcagatacttctgtaccggccaaggtataacggtaaatgttatcgatgaacagcagtacgtcacgaccttcatcacggaatttctccgccatggtcaggccggtcaatgctacgcgcagacggttacccggtggctcattcatctggccataaaccagtgatactttgtccagaacgttggagtcagtcatttcgtggtagaagtcgttaccctcacgagtacgttcacccacgccggcaaagacagaataacctgagtgctcgatcgcgatgttacggatcagctccatcatgtttactgttttacctacacccgcaccaccgaacagaccgactttaccgcccttagcgaacggacaaatcagatccattaccttgataccggtttccaacagatcctgcgagctggcaagctcttcgtaagaaggcgcttcgcggtggattgcccaacgctcttcttcaccgatggcacctttcatgtcgattgggtcacccaatacgttcatgatacggcccagagtagctttacctactggcacttcaattgggtgttccaggttgattactttcaacccacggctcagaccatcggaagagcccattgcgatacaacgaacaacaccgccgcccagctgttgctgaacttctagcactagcttggaagccgtgccttcgacctcaagggcgttgtacacttttggtacagcgtcttgggggaattcgacgtccactacggcgccgattacctggataatctttccagtagccatcttgaatcctctacgtaatacatttacccgtcatacttcacattgctgacgcgttggctgtcttctttcactcccgctgcttacttcaagtaaacacccggaggctcgctcagttgccgccttcccgcaatatgaactatttggggtaatagcctggttaaaccgcggaggctcccccgacgatctcggtgagttcctgagtgatgctggcctgacgagccttgttgtaaaccaactgcagctctttgatcaggctaccgccgttatcggtggcggctttcatcgctaccattcgcgcggcctgttcgctggccaggttttcaacgacgccctgataaacctgtgattccacatagcgacgcaggagggtatccagcaacgctttaggatcgggttcatacaggtaatcccaggatttcttcttcagctcgccgtcttccgcaggcggaagaggtaacagctgcatgatccgtggttcctgagacattgtgttgataaacttgttatttactacatacagtttgtccaggcggccttcatcgtaggcttgtagcatcactttcaccggcccgatcagttctgacagagaagggttatcccccatgccagtaacctgagcaacaatattgccgcccacggaaccgaagaaagatgccgctttggaaccaatcagggcaagatcgcactcaacgcctttctcggaccaagctttcatctcagccaacagttttttgaacaggttaatgttcaaaccaccacatagaccacggtctgtagaaaccaccagatacccgacgcgtttcacttcacgttcgtccaggtaggggtgtttgtattccagattacctaacgcgaggtgaccaatcacactgcgcatcgtttctgcataaggacggctggccgccatgcgttcctgcgatttacgcattttggaggcggcgaccatctccatggctttggtgatcttttgcgtgttttgcacgctggcgatcttggaacgtatctcttttgcgccggccatttctgcttctcctcattgccagacggcctgctttcctaacgaaaagcaggaccgaatagcgttaccaggactgggttgccttgaatgtgtcgaggatgcctttcagcttggcctcgatctcatcgttatacgcgccagtttggttgatttgttgcagaagctcagcgtgctcacggtcagcaaaagctaacagcgcagcttcaaagctacccaccttcgccagctcgatatcacccagataaccacgttcagctgcgaacagaaccagagactgctgtgcgacagacatcggcgcatactgtttctgtttcagaagctcggtcactttctgaccgtggctcagctgtttacgtgttgcatcatccagatcggatgcgaactgggagaacgcggcaagttcacgatactgtgccagagcggtacggataccaccggacagttttttcatgatcttggtctgcgctgcaccacccacacgagatacggagatacctgggtttaccgcaggacgaataccggcgttaaacaggctggattccaggaagatctgaccatcggtaatcgaaattacgttggtcggaacgaacgcggaaacgtcacctgcttgcgtttcgatgatcggcagagcggtcaaagaaccggttttacctttcacttcacccttggtgaatgcttcaacgtagtccgcgttgacacgcgcagcacgttccagcaaacgggagtggaggtagaatacgtcgccaggataagcttcacggcctggtggacgacgaagcagcaaggagatttgacgatatgcaacggcctgtttggacaggtcatcataaataatcagcgcatcttcaccgcgatcgcggaaatattcacccatggcacaaccggagtaaggtgccaggtattgcaatgctgcagattcagacgcggtagcaacaaccacaatggtgttagccaaagcgccgtgttcttccagtttgcgcactacgtttgcaacagtagaggctttctggccgatagcaacatacacacatttgatgccggaatcgcgctggttaatgatcgcatcaatcgccagagcagttttaccggtttgacggtcaccgatgatcaattcacgctgaccacgaccaattggaatcatggcatcaacggatttataaccagtctgaacgggttcatcaacggattgacgttcgataacgccaggtgcaatagcttcaacggctgagaagccgtcgttttctaccggacctttaccatcaataggttcacccagagtattgacaacgcgacccaacaggccacgaccgacaggaacttccaggatacggccagtacatttaaccttcatgccttcagcaagatcggcgtacggacccataacgactgcaccaacggagtctcgctccaggttcagtgcgatagcgtaacggttgcctggcaatgcgatcatctcgccttgcataacttcagccaaaccgtgcacgcggatgatcccgtcgctgacggaaacaatagtaccttcattgtgagcttcgctcaccacattgaactgagcaatgcgctgcttgatcagttcgctgatttcggtggaattcagttgcatatgctccagtccccttaagactgcaagacgtctgccaggcgttcaagacgaccgcgaacgctgccatctatcaccatatcgcctgcgcgtattacgacgccggccattacagacttatcaattttgcaattcagcttaactttgcgtgacagacgtttttccatcgcagcggcaatcttagcctgctgttcgtcactcagtgcactcgcagaggacacttcaacgtcgacggtagactctaacgaggcacgcagttgaataaactgctgcagcacctcaggaagaaccagtaaacggccattctccgccataactcggataaagttctgtgcgggcacatcgagttgatcaccacaaacggcaataaacgttttcgacattgattcaggtgcaactgcacctgaaagcaattcggcaatctgttcattgcgcgttacctgagcggtaaacgccagcatttcctgccaatgttcaaccgcctggtgctcaacagcaaagtcaaaagctgctttggcgtaggggcgagctacagttacaaattcagacatcagcccctccctccttacagttcagcgaccagtttatcaacgatgtcgctgttagcagcttcatccacggaacgttcgatgatcttctcggcgccagctattgccaacatcgcgacttgcttacgcaactcttcacgagcgcgcttacgttcggcgtcgatctctgcctgcgcttgcgccacgattttgttacgttcctgttcagcttcagttttagcttcatcaaggatctgagctttgcgtttagacgcctgctcgatgatcacctgagcttctgctttcgctttcttcagttggtcggtcgcattggcttgcgctaagtccaaatcttttttggcacgctctgcagaagagagaccgtcagcaatttctttttgacgcttctcgatggcagccataattggcggccatacgtacttcatacaaaagatgacaaacaggacaaacgcgatggcctggccgaggattgttgcgttaagattcacagcacaatgcctctttcaaagttaatagtttggtgtagtttcacagtagagaaaatctctacttacgcgacagcaaacatcacgtacagacccagaccaacagcgatcattgggatggcgtcaaccagacccatgacgataaagaactgtgtacgcagcagaggaatcaggtcaggctgacgtgcagcgccttccaaaaatttaccacccaggatgccgataccgatcgcagcaccgattgccgctaaacccatcatcacagcggcagccatgtacagcagatccatattcaggttttccatgacagtctccagttatttcagttaaaacgcagtagtgttataagaaaatcagtgctcttcggatgccatcgagagatagacaatcgtcagaaccatgaagataaaggcttgcaacgtaataatcagtatatggaaaatggcccaaggcacacttaacaaccactgagaccaccacggcagcaggccagcaatcaggatgaagatcaactcacccgcatacatgttgccgaacagtcgcagaccgagtgaaaccggtttggacagcaggctgacaccttccaggatcaagttgactggaatgaataccgggtgattgaacggctgcatcgttaattcttttacgaagccgcctacacctttcattttgatgctgtagaacaggataaggatgaaaacacccaaagccatagacaaggtaatgcttacatcggcagtaggtaccacacgcagagccggtaatccaaagacgtgttcaccgatgaatggcagtaaatcgattggtagcaagtccatcatattcatcaggaagacccagacaaacacggtcaacgccagaggagcgatcactttgctcttgccgtgatacatgtccttcacgctgctatcgacaaaaccgataatcaattcaacggcggtctgcagtttacccgggacgccactggtggcacctgcagcaactttgcggaacaaaagcagaaaagctaaccccagcacgacagagaagaacaatgagtcaatgttcaacgtccagaacgatgcagggccagtagagtggggattgaccaactcgaaggtacgcaggtccaactgaaggttattcagatggtggcctatgtagtcccttggagtagagatttctcctgatgcagacatgatgcctcttacccttttttagttaaatacgataactgttttaagtacggtaaccgctaattacggccggtgccaatatctgcacaatcagcaccgataaataggttaaaccgagtgggacaaacgccgctttaaacagccccaaagccacaatcagtaaaattatcgtaatgataacttttaacccttcgccaatggcaaacgtccaagcaacacgacccggagccgctgtttttgcctgatggcggcaagcaaacagcatgaacatggcatttggcaaccaggccgccaaaccccctgcgaatgcagaagcactccattccaagcctttcaaaccgaaagcagcgctgagaacaacaaaagtcattaactgcaaaaacagcaactttcgcgcaattttcccgttgtaaagggatacaggcatgacgtttgttctctccctacccctcgatgggtatactgagtgacgtataaaactgcctttgccccagagagtcaagcagcaaaaaacgagcaaattatacggtgcacaccaacgaattcaatcgataagtagcgaaaaggtgaacaattatttaaattttcttctttcggactcttttcacaagaaatccctcggaataaatctcacattattttgtctgactattccactggctctcaataaagcgtgctgttgctcacagaacttaatattatctatttatatcgagaacgcttttctttgtctttaaccaaaagagccattaaatacatatataaatcaaagaattgaatttaaacacaccgtaaacatcttatctaccgaaccaaaaccttctgttgacattttcgataataatattgcaacaagttaaacacataaaaacgaagaataatgaatcaaagtagtttcattcgtgattatatccctgcgtccaacctgatatgtcaattcccggatacattcttgtaataatcaggtgaatatttacacatccaccgaattaattaactcagacaattaacccgggtgaaatacctaattccgaaaaactttattgctttttttgataaataacaaacttagtttggtttaaggataaccaaatgccgttcgccatctaactcaggaacctgtagtcgaatcacagactccaattcaataccttgtggcaaagtcgataattcatcatcagggcgtacgcctttcagcgcgtaaaaacgcccttcaggcctggctggcaggtgatggcaccaagacagcatatcgtccaaagaagcaaacgcacggcttatcacgccatcaaacccaggttggccgctaaagtcttccacacggctctgcacaggctcgatattagtcaaccccaactcatgttgtacctgacgcaaaaagcgcacacgctttccgaggctgtctagcagagtgaaatgtgaatcagggcgcacgatagccagaggaatgccaggtaagcccggcccggttccaacatcgataaaccgctgaccttgcaaatgagggttaaccacaatgctatccaggatatggcgaaccagcatttgttcagggtcgcggacagaagtcaggttataagccttgttccacttgtgcaatagctcaacatagccaataagctgctgtttttgttgatcgggtaacgaaattcccgcgcttttaagcaaggattctaattttttttgcaccacaatttcctctggccataagcggcgtagccagcgttaataagtcatcgaaaaagagatttgcctgcgttagcaggcggtcgctggtgcgctaagtctagcgcaccgcagaatacattcaggcactacgacgaagtaagccctgttttttcaaccagaccagcaagatagagattgcagctggcgtaacgccagaaatacgcgatgcctggccgatcgagtttggtttatgatcgttcagttttgccgtgacttcattcgacaaacctgaaacctgactgtaatccagatccgcaggcagcaacgtgttctcattgcgcagctggcgttcgatttcttcctgctgacgggcaatataaccctcgtattttacttgaatttcaacctgatccgcagactgaggatcgctcaatgctgggccgaatttgtccagtgaagtcagcatgcggtaatcgatttcagggcgtcgtaacaactcttcgccgttggcttctttggacaaaggcgctttgagcaacgcgttgatttgctcgatgttctctgagttcggatgcaccatgatatcgcgcagacgctggcgttctctctcgatttgctcgattttctggctgtaatgagcccagcgagcgtcatcgactaaaccaagcttacgtccagtttcagtcagacgcagatcggcattgtcttcacgtaacatcaagcggtattcagcccgagaggtaaacatgcgatagggttctttggtgcccaaagtgctcaaatcgtctaccagcacaccgaggtaggcttcatcacggcgcggtgaccagccttcgtcttcgttggcaaagcgacctgcgttgaggccagcaagcaagccttgagccgccgcttcttcgtaaccggtggtgccgttgatttgccctgcaaagaacagcccctgaatatatttactttccagagtcggcttcaaatcacgtggatcgaagaaatcatactcaatagcgtaaccaggacgaatgattcttgcgttttccatacctttcatcgaacgaacgatttgcatctgcacatcaaatggcaaactggtggaaatcccatttgggtaaatttcgttactggttaagccttctggctcaaggaaaatctggtgcgcattacgatcggcgaagcgcatgactttgtcttcgatcgaggggcaatagcgtgggccgatcccttcaatgatcccagcatacattgggctacgatcgaggttattacggataacctcatgggttttttcattggtgtaggtgatatggcaagccatttgctcaggatgctgtgaggcattcccgaggaatgaaaataccggcaccggatcgtcacctagctgcggtgtcaattggctgaaatcgatagttctggcgtcaattcgcggtggtgtaccggttttcaggcgattcactctcaacggcagttcacgcaaacgctgtgatagcgagatcgatggaggatcgcctgcacggccaccgctgtagttttccagcccgatgtgaatcttaccatccaggaaggtccctacggtcagcacaacggctttggcgcggaatttaagccccatctgggtgacagcaccgacaacccgatcgttttccacaattagatcttcgacaggttgctggaagatcatcaaatttggctgattttccaatgcggtacgcaccgcctgacggtaaagtacccgatcggcctgcgcacgagttgccctgactgcggggcctttgctcgcgtttagtatcctaaactgaatgcccgcctggtctgttgccatcgccatcaacccgccgagggcatcgatttcttttaccagatgcccctttccaataccgccgatcgctgggttgcaagacatttgccccagtgtgtcgatattgtgcgtcagcaagagggtctgacgtcccatgcgtgccgctgccattgcagcctctgtgcctgcatgaccaccaccgatgatgatgacgtcaaattgatctggataaaacatggtactgcacctcgccgttatgcgaatgatcgttggtttgccctggggtgggggattctactcaagtttagacgatcgaccaagtgccttgggatcgcccttaattaaaagaagatctttttatttaaagatctctttattagatcttctattaggatcgcgatcatctgtggataagtgattattcacaaataagatcatgggattaaggaggatcgtttgctgtgcatgatcggtgatcctattgcgtataagctgggatctaaatgccatgttatgcacaggtcacaatacgtacgaaggttgttatagggataactaccggttttaccctgcttataagcatagttatccacaatcgttcgcgtgatctttgagcgaattagagtaaattaatccactttttaacccattcctcagctggatcctcaggaatctcatgttgagtgacgtcgatctcgagtatttcaccgatccgtttagccccttttgcgatcaactgttgatcaagagagcggatcgcaccgcaaaaagtgtcgtactcggaactgccaagaccaacggctccaaagcgaacctgagataagtcgggttgttgttgctcgatttgttcaagcaaaggctgaagattgtctggtagatcacccgctccatgagtcgaggtcaccaccagccacaggccttgcggcgttaattcatctaattccgggccatgcaaagtttcagtggagaaacccgcttcttccagcttctcagccaaatgctcagcgacatactctgcgctgccaagagtgctgccactgatcaacgtaatatcagccataaacaacccaaccaaagtaaagaggcggtattgtactctgtgaatcagctgggatctacctgtggacaatatgggtatagttatttcttcattatggcacgatggtacgcataatggggttctgtagtgaaattaacgtctcggtagactggatctcatcaatagtctggatcttgttgataagtacctgttgcagcgcatcaatggatcgacacatgactttaataaacacgctgtagtgcccagtggtgtaataggcttctacgacctcttccaggctctccagttttttcagcgctgaggggtagtctttggcactttttaaaataatgccgataaaacaacacacatcatatcccaaccgttttgggtcaacgtgaacgcaagccgcggtaatgatgcccgcctgcttcattttctcgacccgaacatgaatagtgcctgggctaacggcaaagtttttggctaattcggcataaggtgtccgtgcattttccattaatgcgttcaggatgccgcgatcgagattatcgatctgatatatttcgctcatatttaccccctatttttatcgataatgcgtatttaaccgataaaaaatgaatgattaaaagtgaaaaggcaatattagttattggatattgaattataggtctgttctgttgcttaatcgatgtcaagccaaacggcatcctgataatcaagcattgagaaaacagccatgaaaaaacaatttatccagaaacagcaacaaatcagcttcgtaaaatccttcttttctcgtcagttggaacaacaactgggtctgattgaagtacaggctcctattcttagccgcgtgggtgatggtactcaggataacttgtctggttctgagaaagcggttcaggtaaaagtgaaaagcctgcctgatgcgacttttgaagtggttcactctttggctaaatggaaacgtaaaaccttaggtcgtttcgatttcggtgccgatcagggtctgtacactcacatgaaagctttgcgtcctgatgaagatcgtcttagcgctattcactccgtttatgtggatcagtgggattgggaacgcgtgatgggtgacggcgagcgcaacctggcttacctgaaatccacggttaacaagatttacactgctattaaagaaacagaagccgcagtgagcgaagagtttggtatcaagcctttcttgcctgagcagattcatttcgtacacagcgaatccctacgcgctcgcttcccggatctggatgctaaaggccgtgaacgtgcgattgctaaagagttaggtgccgtattcctgattggtatcggtggcaagttggcagacggtcaatctcacgacgttcgtgcaccggattatgatgactggacgtcgccgagcgctgaaggctttgctggtctgaacggtgacattattgtctggaaccccattctggaagatgcgtttgagatttcttccatgggtatccgtgtggatgccgaaacgctgaaacgccagctggcgctgaccgcagatgaagatcgcctgaaactggaatggcatcagtcactgctgcgcggtgaaatgcctcagactatcggcggcggtattggtcaatcccgtttagtgatgttactgctgcaacagcaccatatcggtcaggttcagtgcggcgtctggggcccggaaatctgcgacaaagtagaaggcctgctgtaattaggcgtagctttaaccgatagaattatcaggcagcccggcgttatcgccgggttatctattttgtttcctgtcagggtgttcttcgtccctattatagtttcctcttttttatcttctaactgtctattgctacttcaatctcttgcctttttaatcacttattcgccgaggcaataaagaatagttcggctatgccgatagtttctgcgattctggaacttatatcttatatacagtcgacctgacgctcagatgccctttcctgcgctaaggcaaataaggaaattgacgaagatggcatccaccttccgctcccttgctccatatatagaacaacgtgaacatttacgcttattactggcttcccatcaatttgatgagcttgattctctgctggatgcctcagctcagcgttggctggatagttcttctcaaccctttgattatgattggatcattagcacttttttcgatccggctgaggttgctacagacacgctttcaaacctgaatgcctggattaaacacaagcccatgtcttatcacgggcgtttgctgcatggctgttattgggaggcagcggcggcgcggattcgtacctccaacggcggagaatacgtctctaacgatcgctgggttggcgctcaactcgcgcgtgatttagggctgatctcctatctgcgggctatttcgctgcatgagcgcccggcttacgcattgcgtcggatgttacgtttaaccgcgtatctgggcgagccgcagtggttatacgatttggctcatgggcatgaaccaacaaattacgtgcaactccaggctgaaaccgagtcggaggtatgggaagcgggtctacgtcgtctgttggctgaaggcggcgatttggcgtctattccacaggcattgcctgggagtcttcctgcccgtcggtctgagaatgttaaaacctattggctcaacgcgaccttggctattcgtcctcaggacgtcggcgttcgcaatgaatatctttacttcctttatccgcgttggggcgggagccatgagcaaatggctgaatttatcgaagggccggtttgtgccgaactcagcgagcaaaacctcaatcttctttgggtcaccaaggcttgggatttcctcggttattccatttatttccctgataaagagcaaaccgacgatattgcttactgctgtgatgcgtttgagcaactgttagcgttggatcttgaagaagatcagcgtgcgagactgttgtatcaatatgctaatttcctcgcttattatggtaatcaggacggtgtctggcagccggaaaaaatgcagcgttgttacgatctgttagtgcaagcctggcaaatcaacccagctatagccaatccgcaaacggggctggatacattgatgagctgcattaatttcgcgaatatcaatgatagccataatttattaccgcaatggttggaacggttacaactatggggaaacgataaatacgcggtgatgttggcggggatcgccagtaaattcggtctgtacggcataaagaaaggccagtttaatcatcagaggttattggctcgagcagcacatctggactctgaagatgtggatgtcgggcaagccgctgcgaacctgtttggttcggtatctgaagaggctggaatatatctgctacaacaggcctgcgagtggggcgacacttcggcaatggcgacgttatcagacgtctacgccggtgtgttatcccgccagaatggccgtgatatggaagcctataaaaatagcgaattaaggacgtactggatggaacgagccgcagacggcggcgacgcgacctgtcagtacaattttgcctatgaaattattgaagataatgagcaactcagcccagagcagtatcagcaggctagagcattactgctaaatgccatgaatacgccgaatgtgcgccgagacgtatgggaacgttcggcgcgtcgattagcgacattattgatgtttagcgatattcaatatgatatggaactctgtctcgacgttgtgctgcctgcgctgtggagtgatgaagaagagccaaaccgcgtctttgctgccggttattatgcgctggcatttcatttgggcgcaggatgtaatcgtaacagctatctggcgaaagtctggctggaacgtgggttggaaatcgatcccgatgacagctatctagctgaccgcgctaccgaaatattccgctataaagagttgttgggcggcgttcgcgccaaaatggggttcggcaaagataaaaaactgatggatcaacgcggatataatctgacatttaatgagtaagccgcaggttcaggctattgcaggaaaaaatagtctgctctgtttcatcatcattacttctctatagtgaaaaccaatatcaatatatagagaaaatcagcccggttattaccaccagcgtcatttccgggctgtttgttatctggttggaggcagtttcagtctgctttcttatttatcgcctatcctcatcatagttagagatttaaaaaccatataaacaacatggaaggttaaatgctcgctatggctctatcacacgctattcgccactatttacatgctcgtccgcgttttttgctttccgtcggcgctggcgtagtcagctttttagtattgccgtctgatttgagcgttctgttccgtttgatggctagctggaatctaggggcgtggatatatctgatttgcctgtggttgctgatgttacgcactgagtcgacgcaggtcaggctggtagccaaagttcaggatcaaagcgccagcgccgtgctggctattgtctctatggcctgtttggtcagtattctggtgattctgtttgctctgagcaaagccaatacgttatccgatgggatgaaggcgctgaatctgttgctaacgggaactacgttatttgtgtcctggttgctgttgccaaccgcttttaccatgcactatgcccatcttttttatctggaaaggccaataccagaaaaaacgctgccgctgattttccccggggatatcaccaaacctacttattgggatttcctttatttcacctttaccatcagcgtggcgtcgcaaacggccgatgtgtctatcggcagctcagatgttcgccgtatcgttttgcttcagtcggttttatcttttatttttaatatgacgattctggggctgtcgataaacgtcggtgccggattgctgaattaagaatatacgtcgattaacgctgccagcggcgcatcaggcgactttttaatccggtatcaaagcgccagatatggtcgaatatccgcatgattcctggcttgccataggctgacatcgcaaccgcatggaaacgatgttggtgtgcttgctgttggattttgatgcgtcggattaattcttccggcaatcgctgcgccacaaaatcggaaataatcaccgcgtcggcgtcataccattctctgtcgtccattttggtcagcgttgcggataagcaggctgccagatctgttccaccgcgaaaacgctggctgaggaagcgaattgcctgttcgagtccgctggacgcggagagctcgtagtgaatgatttctgtcgcgaataacataatgtagcaacggcggttgtcttccaatgcgatgcgtagcaacgccaggcaaaaggctttagcgcactgttcattgaatccgcccatcgatccggaagtatctacgcagacaataaaagggccgcgcggctgttgatcgctatttttcaaactgactggccgctgtaactgctgttcttgccaggcatcgccctgtagccgataagtcagcaagcggcgttccaacaggcgacggtaaaactcgaattccagctcgctcatgcctagcatcaccagttcggtcggcagtaaacgtagaatgtcattactttgatgaataccactgacttcctcaggcacggcgtctggcattcgcaccatcactgagtaaggttcgaagcgagcatctggcgtcggtaatgccttagctgaacggctacgccccaactgttcggccagtttttgtaattccggctgttgctgcaaaaaatcaccgtactgcagtaataactgataatccccgcgctgtaattgtccctgactcatatcccacagtctgcctgcggcggtgtcgttatctgccagtatcggctccaaggcgccggtcagcgccagccgctgctgcaattcggccagtagctgctcacgttcctgttctaacagctggtggtgcagcgtaacggtttgtaccgttaaactaatgcgccagcgttgtaaaaacagcgtttgcaggctatcgccgtggggaggattattggccagatcggcggcttccagcatggatcgcgcctgagtcgcgaaaggagaatggatcttctccatattttccgccacttcccaaacctgctgataaaaggtcacgctgtcctgaagttggcagcgctgatagagcgtaaattcgttcgccagcgccggtggcacctttgcttcctgaattcgttgctgcagtttgagtttccagccgggaatatctttcatcagggcgcgtttcattcgagggaacttctcaaagaaaatagccagctgtggcgcggccaacagaccgatcaccagttcatctatcagttggttttcactgatagacagcagcatatccaacgttgccaagctgagcacggctattgcccacgcattttttggtgttgctgtttcacctgctcagcaacttgtagcaagctggcttcaattttcgccagccagcttgaaggtgtgaacaggcagggttggtgctggctaaactgtctgcgtttttctgagagacgaatttccaactcactcatttgagttaataacgattctggtacagctccggcggattcacccggcagagaaacaaccgcgccctgacgactaacgtccaaaataaccaggtgctggcggtcgtcaatttcggcatcaatgctctgtgcgaaaccgacgccattcagtttggcacgcagtacgccgcctttgtttagccattgcaccagagcgtcccgctcgatttgcagatgattgacttgaatatcgtgcaaattcagcggtttttgtaggaaaaatgtcaaagttgcatcggtcagattttctggcaaagaatattggggcttacggctgaatatgccgctttgctttatcaacgtgagcgcttgccgatcgctttgctgttgctgatgttgcagccattgagcctgaatatgttggagctgagtgataagcagctgttgctgatagctttgctcacataacagttgttccaactgctgctggagtagtttgagagagttaaggtcatgccacaggcaatctttcagtaaaatcatatcgataggcgcaatggcatcgcgaccgctgaaaaaggcgctggcttgcagcaagcgcagggcttttttccaacgtcgatcagaaacataaggcgcctgctctaaggcacctaagcgttgacgtaattgaaaaataagttcgaaacaattatctggcagcgtaattttatctatctgtggctgccactgatgaaactcttcatcggtgatactaagattttccgccaccggattatggttttcgttttgacgcgttaatagcaatgagcggaagttttgtttttcctgcactcgatctaaccacaggcgaattagcatacggtcataaagagcctccaaactgctatcggcatcgggcagttcgttggatgccgtaaccaacagacgcattggaatgctttcttctttgtcaccgttgcgaaaacgccgttcgttaatcgctgtcagcaaagtattcagaatcgccgggccagctttccagatttcatccagaaaaacgatttccgcttccggcaaataaccgtgggtcattcgctggtaacgcccctcttctttcagtgcctgaatggatagcgggccaaagacctcttccggcgttgaaaaacgcgtcatcaggtattcaaaagccctggcattacggaaggcaaacttcaggcgacgggcaatcagacttttagcaattccaggtgggccaagtaaaaacacgctttctccgctcaacgcggcgagcaggcataagcgtatcgcttcctgcctttcatacagtccggtttccagcgcattacttaaacgggatattctgtctgctaattgcgttgattgcgccataattatcctaaacggtcgatgcgtgaactgatatttacccaagaggtagagattaaaccactttttttaatgttatagcttcttgattagtaaaatttttatgttattgatgatgcttacctcatcatttattgccttctttatctcccgatttaagggtaggcaatcagtttaaatcgtgcatactgtgcgccttttggtgagcgtcaagggacagagaaccgtcggttgggttcttaaacgcacgcatcagcttatggatgttctagcaaaaagaaacaaattatgagcacagaacataaacgatctttatcggcagtaaccctggcagcaataggggtagtgtacggtgatattggtaccagtcctctttataccttaagagaatgtttttctggtcattatggttttgacgtgcgtcctgacgtcgtatttggttttctctctctgatattctggatgttaatcctgattgtctcgctaaagtatcttacctatgtgatgcgagccgataacgccggtgaaggcgggattttaaccctgatgtctctggccggcagaaacacgtcctcccgcgcaacgtcgatattggtcatacttggcctgataggcggcagttttttctatggcgaggtcgtgatcactcccgcgatctcggtgatgtcggcgatagaaggtttggaaatagccgcccccgccctcgatccttatatcgttccctgttcaattgccgttctgactttattgtttgtcattcaaaaacacggtaccggtagcgtgggcaaactctttgcgccggtcatgttagtttggttcctgacgttagcggtgctgggtattcggggcattatggataacccggaagtgctcaatgcgatgaatcctaagtgggcgctggccttctttgcggaatacaaaacggtttctttctttgccttaggtgcggtagtgctggcaattaccggcgtagaggcactgtatgcggatatggggcatttcggtaaattccctattcgtctagcttggttcaccgtggtgctgccttcgttggtgctgaactactttggtcagggcgcactgttgctgaaaaatccggaagcgataaaaaaccccttcttcctgctagctcccgattgggcgctgattccattgttggttctggcaacgttagcgacggttattgcctcgcaggccgtgatttctggcgtattctccctgactcgtcaggcggtgcgtttaggctatttaccaccaatgcgcattatccatacttcagaaatggagtctggccagatctatattcccgtaattaactggacgctatatatcgccgtagtattggtgattatcggcttcgaacgttccagtaatctggccgcggcctacggtattgccgttaccggcaccatggtattgaccagtattctgttctgcaccgtggcgctgaaaaactggcactggaatcgggtattcgtagcctgcttattgatgatattactgatcatcgatatcccgatgttctccgccaacgccttgaagctgttctccggcggttggttacctctgacgctgggtctggtgatgttcatcatcatgaccacctggaaaagcgagcgtttcagcttactacgtcggatgcatgagcacggtaattctctggaagcgatgatcgcctcactagagaaatcgccaccggtgcgggtttcaggtacggcggtatatatgtcgcgtgccgtgaatgtgattcctttcgcgctattacataacctcaaacacaataaagtgctgcatgatcgcgtggtattgctgactctgcgcactgaagacgcgccttatgtacacaacgttcgccgtgtgacaattgagcagctctcaccgaccttctggcgtgtggtggccagctacggctggcgagaaacgccgaacgtggaggaaatcttccaccgctgcggtctggaggggctgccttgccagatgatggaaacctccttctttatgtcccacgagtcgttaatattgtcgaaacggccttggtatttgttcctgcgcggtaaactgtttatggctctgagccgcaacgctctgcgcgcgccggatcagttcgaaatcccgcctaatagggtgattgaactgggaactcaggtagaaatctagttactaaggccgtcattccgacggcctttttacttcttgtactgatacgcactgactttttatccgcagattttccctaccacttattttcccgaagtatttagccagtttattcatccttgtttaatagtgcagcgaaacgtttcgatggcgatcacaaattcaccacattaggtttgccttctgctgtcttttttttaaacttatccatcagcgaaacgtttcgctgtcggagcaaaaaatgaaaaaaggcgtattactgaattctgatatttccgcggttatctcccgattaggtcatacggatcaaatcgtcatagcggatgctgggctgccgattccggccagtaccacccgcatcgatttggcgctaacacagggtgtacctggcttcctccaggtgctgtcggtggtgacgcaggaaatgcaggtagaaagcgctattttggcggaagagatcgcgaagaataatccgcagctccatgaagctttgctgacacaacttaaacaacttgagcaacaccagggaaactccattgctttgcactatgtcagccatgaggctttcaaagagcaaacaaaacatagccatgcggtcatccgtagcggggaatgttcaccttttgcgaacgtgattctctgcgctggcgtaactttctgaggcatttatgcaacctttgctgcaattgaaagggattgataaagcctttcccggcgtcaaagcgctctctggcgctgcactcagtgtttaccccggacgggtaatggcgctggtgggtgaaaacggcgcagggaaatcgacgatgatgaaagtgctgacgggcatttataccaaagatgccggtagccagcattttctcggtcaggaagtggtattcaatggtcccaaggcctcgcaggaagcgggtattgggattattcatcaggaacttaacctgattccacagctgaccattgccgagaatatctttcttggtcgtgaattcgttaaccgttttggcggcatcgattggaaaaagatgtatgccgaagcggatcgcctgttatcccgcctgaatattcgctatagcagccatcgtttggtcggtgagctttccatcggcgatcagcaaatggtcgaaattgccaaggtgctgagcttcgaatccaaagtcatcattatggatgagccaacggatgcgctgacagacacagaaaccgcctcgctatttaacgtaatcaacgagttaaaagctgaagggcgcggcattgtctatatctctcaccgtctgaaagagatttttgagatctgcgacgatgtgacggttttccgcgacggccagtttatcggtgaaaagccggtaagcgagctggaagaagatacattgattgaaatgatggttggccggaagctggaagaacaatatccacgcctgaatttgcctttgggcgatgtgcgcttgcaagtgaaggaactttgcggcccaggggtgaacgacgtcagctttacgctgcacgccggtgaaatcctcggtgtggccgggttaatgggcgcagggcgtactgaactgatgaaaatcatttacggcgcgctgccgcgtaaatctggttatgtgatgctggatggtcgtgaagtggtgacccataccccgcaggacggtttggctaacggcattgtttatatttccgaagaccgtaagcgtgatggtttggtgttgggaatgtcggtcaaagaaaatatgtctctgacggcattacgttattttagccgcagcggcggatcgctgaaacatggtgaagaacagcaggccgtggctgactttattcgtttattcaatattaaaacgccatcaatggaacagcctataggtttgttgtccggcggcaatcagcagaaagtggcgatagcccgaggattaatgactcgacctaaagtcttgattctggatgaacctacccgcggtgtagacgtaggggcgaaaaaagagatctatcagttaatcaaccagttcaagcaagaagggctcagcatcattctggtttcttcagaaatgccagaggtgataggcatgagcgacagaattctggtgatgcatgaaggtcatttaagcggtgagttctctattgaacaggccactcaagaagtgttgatggcagccgccgtcggcaagcgtgatttatttatgagtagtagcgcgcaaagcaggagtaatcagatatgagttcccagactatccagaccaaacgctggttcagcaaagagtggctactagaacaaaaatcgctgattgcgctgctggtgctgattgccgtggtttcgtccctcagcccgaatttcttcacgctaaataacctatttaatattctgcaacagacctcggtgaacgccattatggcggtagggatgacgttggttatcctgacgtcaggcatcgatctttccgtgggttccttactggcgctgaccggcgcagtcgcggcatcgattgtcggattggaaatgaacgcgctggtggccgtgggtgccgcgttggcggtaggagcctttgttggcgcctgtacgggcgtcatcgtggcaaaaggcaaggtgcaggcctttatcgccactttggtgatgatgctgctattgcgcggcgtgaccatggtgtataccaacggtagcccggtgaataccggatttaccgatgccgccgacgcctttggctggttcggtattggccgcccgttagggataccaacgcctatctggttgatggctatcgtttttgccggtgcctggtacatgctgcaccatacccgtttaggccgttacatttatgctctgggcggcaacgagtctgccacccgtttgtccggtatcagcgttgataaagttaagattattgtttactcactgtgtggcttattagctgcactggctggcattatcgaagttgcgcgtctatcttcagcccagccaactgccggtaccggctatgaactggatgcgattgctgcggtggtattgggcggcacaagtctggcgggaggcaaaggacgcattgttgggacgctgatcggtgccctgattcttggcttcttgaataacggtttgaatttattgggtgtctcctcctattaccaaatgatcgttaaagcagtagtcatcctgctggcggtattggtagataacaaaaagcagtaggcgacgttgcaacaataacgcctgcaaaattaacgatgctctctccctacaggaactgcgaccatgaaaatgaaaaaactggctactttgatctctgttgttgccctgagcgccacggtgagtgccaatgcgctggcaaaagacacgatcgcgctggtagtttccaccctgaataatccgttctttgtttcaatgaaggatggcgcacaaaaagaagcggacaaactgggctataacctggtggtgctggattcacagaacaacccggcgaaagagttggccaacgtacaggatctgacggttcgtggcaccaagctgttactgattaacccaactgactcagatgcagtgggtaatgcgattaaaatggcaaatcaggccaaaattccggtaatcacgctggaccgtctggcttctaaaggcgaagtcgttagccacgtcgcttccgataaccgctttggcggtaaaatggccggtgacttcatcgccaaaaaactgggtaacgatgccaaagtgattcaactggaaggtatcgccggtgcttccgctgctcgtgaacgtggcgaaggctttaaacaatcgatggaacaacataaattccaactgttagccagccagccagcagattttgaccgcaccaaaggcctgaacgtgatgcagaatctgctgaccgcacatccagcggtacaggctgttttcgctcagaacgatgaaatggcgctgggtgcgctgcgtgcattgcaaactgcaggtaaaaccgatgtattagtggttggttttgacggcactgacgacggcatcaaagcggttgaaggcggcaagttgggtgcaactatcgctcaacgccctgaccaaatcggcgctatcggggttcaaactgcggataaagtgctgaaaggcgaaaaagtacaggccatcatcccggttgatttgaagttagtgaccaaacaataaaagcagagaatttaggtatcacgccgccgcagcaatgcaatgttagcggtggcgttatctacaaaggaatagatgcgatggaaacaggtaagctagtggttcttggcagtatcaatgctgaccatattctgaatattgagcaatttccacgtccgggtgaaacggtgatcgggaagcagtatcacgttgctttcggtgggaaaggtgccaatcaggcggttgccgccggccgcagcggagcggatatcgcatttattgcctgtgtgggtgaggatgatattggtgaacgcgttcgtcaacagttggctaaagaccgtatcgataccacgccggtggaagctatcgcaggcaaaactaccggtgtagcactgattttcgtcaatggagagggggagaacgttatcggcattaatgccggagcaaattctgccgtgacacccgaataccttcaacgttatcagcagcaaattattgatgcgcaagcagtattgatgcagctggaatctccgctggaaaccgtgatagccgctgcgaaactggcgagagaaagccagacgcaggtgattctgaatccagcaccggcgcgcgagctaccggatgagttattacagctggtggatatgattacaccgaatgaaaccgaggccgagcgcctgacaggtattcatatcgaaaatgaggaagacgccaatctggcggctcgggcattacatcagaaaggcattacgacggttattatcaccttgggtagccgcggtgtatggcttagccagcaaggtcagggcaaactgatgccgggttttaaggtgaatgcggtcgatactattgccgccggtgatacttttaacggcgcactgcttacagcgttattggacggtcaggaaatggcatcggcgatacgttttgctcatgcagcggccgcgattgccgtgactcgccctggcgcacaaccctccattccatggcgggccgaaattgatgccttcttgcaaaaccagaggtaattttggcgaccatgaaagatgtcgcccgtttggcgggcgtttctacctcgacggtttctcacgtcatcaacaaagatcgttttgtcagtgaagcggtacgcgacaaagtcgttgccgctattaagcaactcaattatgccccttcggctttggcgcgtagcctcaagcttaatcaaacccgcactattggcatgttggttacggccagcagcaacccgttttatgccgaggtagttcgcggcgtggagcgcagttgctatgagcgcggctacagcctgattttgtgtaataccgaaggcgatatcgatcggatgagccgtagcatggaaaccttgctgcaaaagcgcgttgatggcttgctattaatgtgtaccgaaaatcatcgcccgtctcaggatgttctccgctgttacccttctttacctattgtcatgatggattgggctccttttgaaggtgtgaacgacaccattcaggataactcgctgttaggtggggatatggccacggatttcctgattgccaaaggctataaacgcattgcctgtatcgccggaccacaggataagactccggccagagaacggctggaaggttaccgtcaggcgatgaagcgtgccggcttgccgatcttggctggatatgaaattgccagtgactttgagtttgcgggtggtttggaatcaatgaagcagttattggctttgcccgaagtgccggaagcagtatttactggtaatgatgcgatggcagttggggtttatcaggcgttgcatcaggttggattatccatcccgcaggatatggcggttattggttacgatgatatcgagatcgcccgttatatgacgccgccgcttacgactattcatcagccgaaggatgatttgggtgaattggccatcgatacattaattcatcgtctgaataatccatttgcagaaccgcagattctcacgctcacacctgagctggtggagcgtggttctgttgctcagcgctagactttgcttttccgcgcgctgcggcctttaatcaggttatcgccatctttaggtttgagtagcaagaacactagggatgaaaccaatgtcactgcgcccatggtaataaaggtgtagtggaaatggtcgatgtgattgccaaacggtaattcctcgtagaaacgcagtacggcggcgctgatagcgacgccaaagctgatggaaagctgttgagtgacggccagtacgctattaccggagctggcgttgttatcggtcaggtctgccagcgtaatggtattcatggccgtaaattgggtagacatcgccattcccaaaatgaatagtggcacgatcattagccagacagacatgcccggcgtttgtaatgaaaacaatccaatcagtgtgccaataatcaacgtaatgctcaccagcacctttctatagcccaaccagcgcaaaacctgagtcacggtagattttgccatcattgagccgatagccgtcggcgccatcatgcaaccggcaatgatggccgagtagccaaagccaacttgtagcatcaatggcatcaggaaaggtacacagccagttcccaatctggaagcgatattaccggctatcccgacggagaacgttctggttttgaatagaggtaatccgattaatggatttgggtgtcccttggcgtggaaaatataaccgactagcaggagcaatcccccaagcatcatcgagggagaaagatagcccgacacttccgctttccccatcatctccagactgatagaaatcatgaccaaactaaagccgaacagtaggaagccactaatatcaaaggctcgcttaggcatagtgaaattaggcatgtatttcagcgcataaaaaatgcctaacaggccaatggggatattgataatgaaaatccaatgccaactggcgtaagtcaccagcaggccacccagcaaggggcccataatggggccgactaaaccgggaatggttacgaaatttagaaccggcagtaattcactgcgcggataagcgcgtaataatgccagtcgcgcgactggcatcatcatggcgccgccaatgccttggataacccgcgaggcgaccagaaatgagagggaacctgataacgcacataataaagagccaaaggtaaacagcgagacggcaatgataaaaattcgccgggtgccgtagcgatcggctaaccagccgctgactgggatcagcatagcgacggttagcgtgtagctgataatggcagactgcatagttaacggcgagcgattgaggctttcggctatcgcgggaagggctgtgtttaatattgttgcgtccagcgcctgcataaagaaagccatggcggcaatccagggtaagccggccatgctacgagcagatttaatcattctatttcctgatggaattcgttattaacaatcctctcttctatatatagataacatgtgattacacactccgtcagtttttgtcttgtaataatacctgacaggcaatgcaggcaccctgactgtcgctggcaaggatggtatcaacgatagattggtggtgttgcagctttatcacttcatcgccggtaatagcacggaagtagctgtgatataccgaactgaacaaattggcgaacgaagtcaggaagggattaccactggcttcgtagatcagttgatgaaattgggtatccacctgaatccagcgttcacgatcaaattcacggtgcagcgcctgcatttctgccatcaatatagccaattgctgtttttgcgcaggattagcgttaaccgcggccaaagcgcaggcctgtggctctaacgcggttcgtaccaaaataaagtgctgcatcacctgatcgaagttttcacgggtcatccaccaggtgagtaactcctgatcgagaaaattccagttggactgcggcataatgcgcgtaccaatccgtggccgtggcaacaacatccctttcgccgctaacattttaaccgcttcacgtactgcagtgcggcttacgccgaactgttcgcctagttctatctctccgggcagtatagaaccggctatatattcgcccgccaggatacgctggccaatcttttcagctaataaataggaaaggttgcgttgggcggcttgttgttgggcgttaaattgcatggtgatttgtcctggctaacttcttatccttctattttactctactgtttcactctggtattggctgtttaactgaaaagtagtagaaaagttatccatttccgcactttttgatgaaaaaaaagccggttggaaaattatttgaaattaggggttgcagcctgtcaggaactccctataatgcgcctccactgaccgggaacaacgaaacaaacttcgccgggtcaggaagtgttaagcaggcggaaacgccggttcttaaaacgaaagttgaaaagaaaagcttgacacttcagcgggaaagcgtattatctgcctcccgcgttaccgtaagattcgccgcaagcgaacgggtaacgaacgctctttaacaatttatcagacaatctgtgtgggcactcgcaagacgatatcaaagcctgtttcggcaggcagaagaaatatcaagtcttgaagagtgaccaaagcagtaaacatttgaacttcggttcgaatgcatatttgcagaaagtaatctttgagcatcgctacttcggtagcaaatcaaacaaatcttaaattgaagagtttgatcatggctcagattgaacgctggcggcaggcctaacacatgcaagtcgagcggcagcggaaagtagcttgctactttgccggcgagcggcggacgggtgagtaatgtctgggaaactgcctgatggagggggataactactggaaacggtagctaataccgcataacctcgcaagagcaaagtgggggaccttagggcctcacgccatcggatgtgcccagatgggattagctagtaggtggggtaatggctcacctaggcgacgatccctagctggtctgagaggatgaccagccacactggaactgagacacggtccagactcctacgggaggcagcagtggggaatattgcacaatgggcgcaagcctgatgcagccatgccgcgtgtgtgaagaaggccttcgggttgtaaagcactttcagcgaggaggaaggcatttcacctaatacgtgaagtgattgacgttactcgcagaagaagcaccggctaactccgtgccagcagccgcggtaatacggagggtgcaagcgttaatcggaattactgggcgtaaagcgcacgcaggcggtttgttaagtcagatgtgaaatccccgagcttaacttgggaactgcatttgaaactggcaagctagagtcttgtagaggggggtagaattccaggtgtagcggtgaaatgcgtagagatctggaggaataccggtggcgaaggcggccccctggacaaagactgacgctcaggtgcgaaagcgtggggagcaaacaggattagataccctggtagtccacgctgtaaacgatgtcgacttggaggttgtgcccttgaggcgtggcttccggagctaacgcgttaagtcgaccgcctggggagtacggccgcaaggttaaaactcaaatgaattgacgggggcccgcacaagcggtggagcatgtggtttaattcgatgcaacgcgaagaaccttacctactcttgacatccacagaacgtagcagagatgcttcggtgccttcgggaactgtgagacaggtgctgcatggctgtcgtcagctcgtgttgtgaaatgttgggttaagtcccgcaacgagcgcaacccttatcctttgttgccagcacgtcatggtgggaactcaagggagactgccggtgataaaccggaggaaggtggggatgacgtcaagtcatcatggcccttacgagtagggctacacacgtgctacaatggcagatacaaagtgaagcgaactcgcgagagcaagcggaccacataaagtctgtcgtagtccggattggagtctgcaactcgactccatgaagtcggaatcgctagtaatcgtagatcagaatgctacggtgaatacgttcccgggccttgtacacaccgcccgtcacaccatgggagtgggttgcaaaagaagtaggtagcttaaccttcgggagggcgcttaccactttgtgattcatgactggggtgaagtcgtaacaaggtaaccgtaggggaacctgcggttggatcacctccttacctaatgatacgcattgcgcagtgtccacacagattgtctgataatagtaatgagcaagagcacctgttgatgtcgtgagtttcgactcatgatgacacgagaaacgattaagtttttgatttagtcggaatttcctgtgtccccatcgtctagaggcctaggacaccgccctttcacggcggtaacaggggttcgaatccccttggggacgccatccgataatgagtgaaagacattatcaactgaatatcttaaagatgactttaacgagtcgtgtttaagatattgctctttaacaatctggaacaagctgaaaattgaaacactgcagctaaaacttgtctctccgtagatttaccgagacaaggagtcatctgcaggtagagtctctcaataatcgcagcacgatgatgtcgaaagacaccttcgggttgtgaggttaagcgactaagcgtacacggtggatgcctaggcagtcagaggcgatgaagggcgtgctaatctgcgaaaagcgtcggtaagctgatatgaagcgttacaaccgacgatacccgaatggggaaacccagtgcaattcgttgcactatcgttagatgaatacatagtctaacgaggcgaaccgggggaactgaaacatctaagtaccccgaggaaaagaaatcaaccgagattcccctagtagcggcgagcgaacggggaggagcccagagtctgaatcagtttgtgtgttagtggaagcgtctggaaagtcgcacggtacagggtgatagtcccgtacacaaaaatgcacatgctgtgaactcgatgagtagggcgggacacgtgacatcctgtctgaatatggggggaccatcctccaaggctaaatactcctgactgaccgatagtgaaccagtaccgtgagggaaaggcgaaaagaaccccggcgaggggagcgaaatagaacctgaaaccgtgtacgtacaagcagtgggagcaccttcgtggtgtgactgcgtaccttttgtataatgggtcagcgacttatattttgcagcaaggttaaccgtataggggagccgtagggaaaccgagtcttaactgggcgtctagttgcaaggtatagacccgaaacccggtgatctagccatgggcaggttgaaggttgggtaacactaactggaggaccgaaccgactaatgttgaaaaattagcggatgacttgtggctgggggtgaaaggccaatcaaaccgggagatagctggttctccccgaaagctatttaggtagcgcctcgtgaactcatcttcgggggtagagcactgtttcggctaggggtccatcccggattaccaaaccgatgcaaactccgaataccgaagaatgttatcacgggagacacacggcgggtgctaacgtccgtcgtgaagagggaaacaacccagaccgccagctaaggtcccaaagtcatggttaagtgggaaacgatgtgggaaggcatagacagccaggatgttggcttagaagcagccatcatttaaagaaagcgtaatagctcactggtcgagtcggcctgcgcggaagatgtaacggggctaaaccatgcaccgaagctgcggcagcgacacttaggtgttgttgggtaggggagcgttctgtaagccgttgaaggtagtctgtgaggactgctggaggtatcagaagtgcgaatgctgacataagtaacgataatgcgggtgaaaaacccgcacgccggaagaccaagggttcctgtccaacgttaatcggggcagggtgagtcgacccctaaggcgaggctgaaaagcgtagtcgatgggaaacaggttaatattcctgtacttggtgttactgcgaaggggggacggagaaggctaggctagccgggcgacggttgtcccggtttaagcgtgtaggggggtgttcctggtaaatccggaaaaccatcaaccctgaggcgtgatgacgatgcaccacggtgcagaagtagttgatgccaagcttccaggaaaagcctctaagcatcaggtaacattgaatcgtaccccaaaccgacacaggtggtcaggtagagaatactcaggcgcttgagagaactcgggtgaaggaactaggcaaaatggtgccgtaacttcgggagaaggcacgctggcgctaggtgaagagacttgctctcggagctgaagccagtcgcagataccagctggctgcaactgtttaataaaaacacagcactgtgcaaacacgaaagtggacgtatacggtgtgacgcctgcccggtgctggaaggttaattgatggggtcagccgcaaggcgaagctcttgatcgaagccccagtaaacggcggccgtaactataacggtcctaaggtagcgaaattccttgtcgggtaagttccgacctgcacgaatggcgtaatgatggccaggctgtctccacccgagactcagtgaaattgaactcgctgtgaagatgcagtgtacccgcggcaagacggaaagaccccgtgaacctttactatagcttgacactgaacattgagccttgatgtgtaggataggtgggaggcatcgaagcgtggacgccagtctgcgtggagccaaccttgaaataccaccctttaatgtttgatgttctaactcggccccataatctggggtgaggacagtgtctggtgggtagtttgactggggcggtctcctcccaaagagtaacggaggagcacgaaggttagctaatcacggtcggacatcgtgaggttagtgcaaaggcataagctagcttgactgcgagagtgacggctcgagcaggtacgaaagtaggtcttagtgatccggtggttctgaatggaagggccatcgctcaacggataaaaggtactccggggataacaggctgataccgcccaagagttcatatcgacggcggtgtttggcacctcgatgtcggctcatcacatcctggggctgaagtaggtcccaagggtatggctgttcgccatttaaagtggtacgcgagctgggtttagaacgtcgtgagacagttcggtccctatctgccgtgggcgttggaagattgagaggggctgctcctagtacgagaggaccggagtggacgcatcactggtgttcgggttgtcatgccaatggcattgcccggtagctaaatgcggaaaagataagcgctgaaagcatctaagcgcgaaacttgcctcaagatgagtcttccctggggctttaagccccctgaaggaacgttaaagactatgacgttgataggctgggtgtgtaagtgcagcgatgcattgagctaaccagtactaatgatccgtgaggcttaaccttacaacaccgaaggtgttttagagagcgttttgattttcagcattgttaacagattggattgactggctgtgtgatgtaaatcacgtggcgggttgattaaaacagaatttgcctggcggcaatagcgcggtggtcccacctgatcccatgccgaactcagaagtgaaacgccgtagcgccgatggtagtgtggggtctccccatgcgagagtaggacactgccaggcatcaaatcaagccaagaccccatgccaaaagcgtggggtttttgctatggaaaaaagacagacgcgaggcggataaaagtcattgccgccctcgaaccgagcctcctgcgattgcggggggctttttgcgtttaagggcatgggaacccccgggaatgccgggcgttgaaggcgtatatggcgattttcattccatagggggcggcttatccggtaaattgcgccgccgttgacgttttcaggcagtaaattcgcagcattttcaggcagatacagtcactcaccgggcttatattttattaaaaagccatgtaaccaacgaaccaggtcggttttatcggaaactcatcccccattaacgggtattcacactcggcggtagctcaagagccaggcttgcatccggtggggcgtaaggggataaaacgtgtcgccagtcgggatgctgaggcctctgatacactaccggcctcactgcgaagagtaacagacagaagatttttaactgctggttaaaactctggcggtgactgacgagtcaggctacataccaaataaccttttttatcatctagattgttgtgttgttaacttgcaatgagggtgattttgccgaagttttaggcaatgtgatgcaaccctaccccaaattagcccagttatcagggtgttataagatgctattaacggtgtgaataagtggctgtttgaaaagtggttttagcggcaagagtgtgggctgtcaggcgcaagcgtcctgttgaaaagtcagctaagtcatcatcttcgagccaacctaatggcgtgaccagctttatactatcagcagcagttaagactgacttttcagccaggaacagatgaaatcagcaatatgatagggttgattaatatccaattgcggtaaatctgtaggtgccggttcatcgcttgctagcgcaataacatgcttatcgattactccggtaaaaggttttcctacagccgctcgatatagggcgatcttattgataggctcatgtctgaacccctcgaccaatacgagatcgatactgtttgcatccannnnnnnnnnnnnnnnnnnnnnnnnnnnnnnnnnnnnnnnnnnnnnnnnnnnnnnnnnnnnnnnnnnnnnnnnnnnnnnnnnnnnnnnnnnnnnnnnnnnnnnnnnnnnnnnnnnnnnnnnnnnnnnnnnnnnnnnnnnnnnnnnnnnnnnnnnnnnnnnnnnnnnnnnnnnnnnnnnnnnnnnnnnnnnnnnnnnnnnnnncaccgcaatgataaattggtgtaagttcgctgagattgtccgattgtaaaaatggcccgattccgcaaagaatcaggccatttttttaccccaaaatcaggctaatgaatcactacaggctgcccggcgtgcgggtattattgcgagttggcgtgttcacgctgcggccagcgcgccccagcgtttccattcgaacctggaacggtgggaacggcagaacaataccatgctcgcggaagccttccagaatcagttgatgtatttcgtggcgcattggcaagcgatgaagcatttcggcggcatagatacgcaactcgaaaatctgaatgccttgctgtagatccatcaggaatgcttctggcccagggttatccaagaccatggaacaacgtctggcggcggtaagcagcagttcggtcacttcttcgctattggcttcggccggagccggtactgttaagaccacgcgagtaataggatcggacagtgaccagttaatgaactgctcggtgataaaggccttattcggcacgataatctctttgcgatcccagtcggaaatggtggtggcgcgggtattgattttggttacgctaccggttaaatcgcgaatagttacggtatcgccaatacgaatcggtttttcaaatagaatgatcagcccagagacgaagttggcaaaaatttcctgtaagccaaaacctaaccctaaaccgagagcggcgaccagccattgaaatttcgcccattcaatccccagtagtgaaaagcctaataggccaccgaacaaaatcaccagatatttggttattgtcgaaatggcataaccggtgccgggcgtcaggtccagatgctgtaatagcgccagttccagcagggcaggcaggttccgcactaactgagtcgtcacgattatgaccagaatggcgatgatcagcgatcccatagtgatcggctggatggattcgacgccgttgatagtcgaagaaacatcccataggcgaatattttccaggaaaccaaaggctgaatggatctctgaccacaggaagatcactgaaaccagcgcgatcatagtgagtatggaacgaaccagacgcagcgattgagcgctgatcacgtccagatcaataaccggctcatcaacatcgaccgacccctcggaactattcgtatgcggcgtatcttcttcacctctggcacgctgcgccaggatatcggcccgacgctgtttagcacggtcaaaggcaatacggcggcgctgaatcagcatccagcggcgaataatatggtaaatcaccagcaggaagaaccagatggcgacggaggtttccagacgagccagcagcgcctgagacgtggtgagataccccatcagcgaggccagcgcggcaatcagcggagcggaaagcagcagcccccacagcgcctgattgatcttattctctcccgaaccttttttatccagatacagcggaataccggcacgtttcagactgttggtgaccagacttagtgcgatacacaacaggacaaagcacagtcggcctaatgtgccggcgaattcgcggtcgttataattctcgaaggttatcaacgccatcatcaacggaataatcagccataccgacatacggtaaaagcgcatcgcacgcgcgacctgatctggcgcccagcggaaatgggtgataaacaggccgtgaggatgagcaaaagcggcgctgatcataaacacccacagtaccggaaccgtggcggtcactgcgttgccaatggcaatcgccatcgggtaggaccacgcgttttgcaacccgtaacccagcgccgcccagagcacaggaagcggcaaggccaccagaatcgaccagaaaacggtgcgcagcgttaatgaaaactgatcttgcgtaactttgccgacccggctgctggctcgctccaaaaacgcatgataatggcgacgggagctgacgctaaagctgacaaacagcagcgcggcgataatcggaatcagcgtttcctgactggtcatcatcatcacaaaggcaccgctgagctgggataaggtatccagcgaaagcaggcgcgtcaggtcacgagcgacatcgatcggataagacaaggaaattgggctaacgtccgcaacccaaaacagatagcggtgggtcgcctcgcggatttcattcagggcatcaaccaattgactattggcgactttcagcttggtcagttcgagaatctgcgtgtcatagccagaaagcagtgaatttagcagttctcgctgggtgcgtagctgagcgtccataatgcgttgttgctgaaccgtcagcggcgtaccgtcgtcctgcgtcgctttggttcctttttgctgctgctccagcatcccttcataggtcagacgctgaactcgaagctgagccatatctctatctaactgttgagattttggcatttcaggcaagcgggctacgtgcgctcgtagggtttcccccagtgcagtagaaatacccagccattgcgcctgttcgcgaatggtgctgagagtctgccgaactcgcagagtgtctgccgccgcctgacgttgttgagaggaaatcaggtccatgcgctgagcctgactgttcagcgcgcgggataaatctcggttggtttctagctgctggctgatggaggccggcagatcgccaccttgttccgccagtaattcggtgcgttccagcgctctttccgcttcaagctggcgctgattattcaaattgttacgcaatgtctgcaataaggtgtctgtccgctcatggttctttttatatacttcggcgcgcatgcgggacaattcttgccggttattggcagaaagctgagaaagctccagctcattcactttggctttacgagccgtaacttccgcctgtaatagtgcaaattgcgcctgcgccagcggagaggttggtgagttttgagattgcagacgcgtcgtggcttcacctaataggcggcgggcatctgattgttgttgaggaagttgccccagagagtcgctaatttcccgcaaacgatcctgttcttgctgcatttgacgggaaagttccagcagttggctgctggtttgcaggatttgctgctccatctcattggtcgataaattggttggcaccggcagcggtttttcgctatccggcgtcaactgttgacgtaactctctggttaatttggggaaatcatcaatgactttctggtattgctgtgcccgttcgtcggactctttcgcatcattaagccagttgatagcaccttgcagcgcctgaacaatttccgcctggttggcggcgcctttattcgcctcagcctgcttcagctcttgtctgagctgagcctcattaggctgagttgccgcataaagcggcagagagagaaaaataccaagcaggaatgtggttatcaggcgcacgttatgcttccttaaatcaagttacgccataaagcgttaggttagcacggaggcgtcggtggaacggcttctgccagtagctcacccatacgggtgatggagccactgtttagctgcggagccagatacactttgcctgatgcaaataggttaataaccgttgagcccagcttgaagcgacccatttcctgccctttctccaatgcaatcgccccttcttcaccggcctgcgggtaggtccagcggcggataaccccttcgcgggttgtattggttgttcctgcccaaacggtttcaatgctaccgacaatggtggcaccgaccagaatctgcgccatcgggccaaaagcggtatcaaagatacagatcacgcgttcgttacgggcaaacaggttagggacattggctgcggtcagcggattgacggagaataaatccccaggtacatagatcatttcacgtagtacgccgtcacaaggcatatgcactcggtgataatcgcgcggcgctaaatacgtggtgataaaggtgccgttcttgaattcttcagccaacaggtagttaccggccagtaaagcttccagcgtgtaattgtggccttttgcctgcaagatttggtcttcgcggatagcgccaagctgactgacggcgccgtcagcaggctgtgccagcgcattgtcttccgccaccacagggcgtgcatccgggcgtaacggacgaacgaaaaattcgttgaaagtggcataagcggtgaattctgggttctgcgcttctttcatatctacgttatagaaacgggcaaagcctttaataaccagttgagtcaaccagccgccttttttgtctgcaccccagccagccaggcgcgtaagtccttgcttcggaagtaaatattgcagtctgattttgatgctatccagcacgagaacctcttggattaggcattagccattagataaaaggggcgcattgtaacgttcggcgcccgcaatgtcagttattcagaatctgaaagcggtttgcgtggtttgacttgttccatgctttccagaattcgatggtagttatcgaaacgctcttcggcaatatcaccgcgctccaccgcttcgcgcagggcgcagccgggatcggtggtatggctgcaatctcggaatttgcaatgaccaatgtagttgcggaattcgacaaacccttgcgtgatttgttccggtgctaaatgccacaggccaaattcgcgcactccaggtgaatcgatcacatcgccgccgtgctggaaatgatacaagcgcgcggcggtggtggtgtgttgtcctaaacctgagttatcggaaactgcgttgaccaaaatttgcgtatcgcttggtggtaacagggcgttcagcaggctggatttacccacgccggattggccggcgaaaatgctgatacggccagccagcgcctgttcaaaggctgccatcccttcgcgagtctggctagacacttccagtaccttgtaatcgatacggcgatagatatccatcatgccatcgacgaatttgcggccttcggcatccaacagatcgactttattcagtacgatcagcggttctacgtccagcgtttcacaggccaccagatagcgatcgataatattgagtgagagttccggcaaaatggccgagacgatcacgatttgatcgatgttagcggcgatcggcttcacgccgtcgtaaatatcaggacgggttaaaaccgaagtacgttcatgtaccgcttcaacaatacctttaactcgaacaccttcctgctgaatacccggtcgccaaacgacacggtcaccggttaccaaagaggtaatggtgcgacggatattacaacggtgttgggtgccatcagtggcttcaacgtcggcgtgctgaccgaaacggctgattacgataccttcttgcgcatcgccaagctgagagtcatctaactcaggttttctatcagtgcgtagccggcgctgatggttagcctgcacgcggcgttgttgacctttggacagtttattcttgctcactgcgcctcacttgaatctgcatttatcgctcgttgcgactaaaagaactatgatacacataattttatcatttaaccgtttgttcggttgatccccccgatgaataggcaggaaatatcatggcaggaaatgaaaataatctgatctggattgatctggaaatgaccggtctcgatccagagcgggatcggattattgagatcgcaacgttggtaacggatgccaatcttaatattctggcagaaggcccggttttggcggtgcatcagtctgatgagcaactggcgctaatggatgagtggaatgtgcgtactcataccggtagtggtctggttgagcgggtaaaagccagcccattcaacgaccatgatgcagaaatgcagaccattgctttcctcgaacaatgggtgccggccggcaaatcgcctatctgcggtaacagcgtgggtcaggatcgccgcttcctgttccgctatatgcctgcgctggaagcttatttccactatcgctatctggacgtcagcacattgaaagagctggctcgccgttggaaaccggaaatcctgccgggctttaaaaagcaaaatacgcaccaggcgctggacgatattcgtgaatctgtggcggaactggcttattaccgcgaacattttatccagctttagtctttaatagataaaatctggtttaaacacggcagaatcttgttctcagtactatgattctgtcgtgcaaatcacgggttttaagcgcttagccgatttattcaacacccgtcgctggcaaaaagtacatattgttgatttaatcgacacttgaacgaaaaaatgatttttttgctttcaggggcttgcagcaaaacggaattctcgtataatgcgcaccccgtaccgatgaagattttcgccagttagcgagatcgaatttagtacgtagagcgggaatagctcagttggtagagcacgaccttgccaaggtcggggtcgcgagttcgagtctcgtttcccgctccaaatttttcaagtagtggcagaagctaacgatgtcggcgaaccattcgctaatatctgtgatgcgggaatagctcagttggtagagcacgaccttgccaaggtcggggtcgcgagttcgagtctcgtttcccgctccaatcttcagccatgaataccaaatgccgtcaaacagacagcagggtgcatcagcatctcaatgcgggaatagctcagttggtagagcacgaccttgccaaggtcggggtcgcgagttcgagtctcgtttcccgctccaattttatcttcatctccaaaataattatccacagacagttcgcgctttttgtcgtgcctttcacagaatgtattaacttcttcaacagacttatccacagattctgtattttttatatactgatgctaattaaaccaatggctattgcctaaatttaactatttgttttaattgtttatttatttatgggaaaacgttatggcgatctcttgcgctttttttcccacttgattggcaaggcatttttatttttatgcacagggcgcttgacaggtttattacggaaaaacccgcgattgaaaagttatcatgcgtctcgcggcagccctttctcaatggctcgaaccagcctctttttctgcgatgactgcacttcaacactttgttctgcccgccgcgccaactgccgctcgatagcccagacgatatgctcatccaacatagggtcgatgcctttgcgactttccagcgccagcacaatttcatcctgataggcggcatttcccaaagccaccgagatattacgtagccagcgcagatgcccaatacggcggatcgcggaaccttcggtgactcgtagaaacttttcttcattccaggcgaacagatccagcagctttggcgtatgtaataccgcacgcgggctgaaatcttcctcctctgttagttgagagaagcggttccacgggcaaatcagttggcaatcatcacagccataaatacgatttcccattaacggtctaaattcttcgggaatagcgccttccaactcaatggtgagataggaaatacagcggcgagcatccacggtgtaaggcgcgacaatggccccggttggacaggtcgtcatgcaagccacgcagcggccacactgttcctcttgcggttgatcgattggcaacggcaaatcaatcagtaattccccaaggaagaaccaggagccagactcgcgattaagaataagtgagtgcttgccaacccagccaatacccgctttggcagcgagtgaacgttccattatcggagctgagtcgacaaacggacgaaaattgacgccgttttcactcgattgctgtgcgcaatactcctgaatctgatcgcccaatttctttaaccgttgccgcaatagcttgtgatagtcgcgtcccaaggcatagcggctgacatagcccaattctggattgctcaaagtgctggcaaaggcggctttggctggcaggtagttcatgcgcacgctgataacccgcagcgtaccgggcagcagttcatgggggcgcgcccgcaacataccgtggcgcgccatccacgccatttcaccgtggtattgcttgtctaaccacgcctgcaaacgaggttcttccgcagaaagatcggtatcgcagatgccaacctgctggaaacctagcgattgcccccattgcttgatatgttgggctaattgattcagatcgagggggtgtgtcatgacggaccatagtaagaaacaaaacggcctaagtttaccacactctgttttttctgcggactgggtcaggcaacatgaaagcgttgctgctgccgctttgtcactttctctgtttgaactgatggttagagccggtgaagccgcttttgctctggctcgccaatattatcctgcgagccgacactggttgattctgtgcggtcatggcaataacggcggggatggatatatcctggctgcccgcgctcaagcggcgggtttgaaagtgacattaattgcctgtgagggcaatcgtccattgcctgccgaagctgctctggcgcgtgagcagtggttatcggcgggggggaatatttttcctcaggatagtctttggccgcaggatattgatttaattatcgatgggctgctgggcaccggcttacgtgccgcgccacgaggcagttacgctactttaattgaaatggcgaatagatatcgggcgcctaaactcgcgctggatattccttctggcttaggggcggaaaccggcgctgctcctggcgtagtgattcgagccgagcatacgctgacgtttgtggcgctaaaaccagggttattgaccgggcaggcgcgtgattgggtcggtcagttgcattgcgacgatctgggtttgtccccatggcttgatcagcaaatgccgcacattgagagaattacctctgataacctcagcaaatggttgaaaccgaggcgaccttgttcttacaaaggtgagcaaggtcgtctattgttggtagggggtgataaaggtttggggggcgcaatacggatggcgggagaatccgcactacgcagcggtgctggattggtgcgagtgcttactaacatcgatcatgttgctcctctactcactgctcgtcctgaacttatggtacaggcactcagcgatgatttattgattgaggctatcgattgggcagacactttggttattggaccggggctggggcaaggagattggggcaggaatgctctgaaattactgcaacagagtgataaacctgcgttatgggacgcagatgcgctcaacttgctggtattaaatccgctgaggcgtcagaatcgagtgttgacccctcatcccggtgaagcggctcgtttgctcggttgtaccgtcgctgaaattgagagtgatcgcttactttcagttcgtcgactggtagagacatacggcggcgtagtggtactaaaaggtgccggtacgttgatagccagcgagcagggcgaaatggcgatagccgatgtggggaatgcgggcatggcgaccggcggtatgggcgatattttgtccggtatcatcggcggtttgatagcgcaaaagctggtgctgtatgatgcggcttgcgcaggttgtgtggtccacggcgcggcagccgatcaactggctgaacaacaaggcacccggggtttactggcgacagatttattgccggttattccgaactacgttaatcctgagttagcaaaatagatatcaagaatgaaagaactcgttttacctttgcctgatgaggcagcaaccgttgcattgggggctcgtttggcgcaagccttcgaaggtgccagcgttatttatctgttcggcgatttaggtgccggaaaaactacattcagccgcggcttcctgcaagctctgggacatcaaggccacgtaaaaagccctacctataccttggtggagccttacgcactgacgcctcggccggtttatcatttcgatctttaccgattggcggatccggaagagcttgaatttatgggaattcgcgactatttcgatcgacaggctatttgcctggtggaatggccgcagcagggcgagggcttcttgcctaagcctgatatcgaattacatttggactatcagccgcaggggcgtgaagctcggctggtagcgctgtctgattctggtgcggatgttctgcaccgcttagccgctgcgcaaggataaactgtcgatgatgcttagctggagaggctatttagccaccgcattgttggttgtttctagcgtattggccgctccggcggcatgggcgatgaagttaaccgatatcaaagttaccaacggttccggcgaaagtcagataaccctgagcttcgacggcaaaccgatttatgccttcttcccgctgagcgggccggagcgcgttgtgctggatattcgtcagagcggtaatctttccggtttaccgctggaattcagtgggcagaatctgttgaaaagaattcgctccagccagccgaaagacccgcaaagcacccgattggtgtttgaactgacgcaaaaagccaaaacacgcgcagtgacgcagcaagtgggcaatcaatataacgtggtgttcaccctgacagccgctggtacgccagtacgtcaaactcaaacggtgaccacggcgacggcgacgcgacaggcaaccaaggccaccgccggcagtaatccgttcaataataagccaacggtagtgaccagcagcccgaccatcaccacctcaaccacgcgtccggttaaaaccagcgcgccagccagtagcgatcgtgtggtggtggctatcgatgctggtcacggcggtcaggatcctggcgctattgggcaaaatggtctgaaagagaaaaacgtgaccctctccattgcccgtaagctggagacattactcaataatgacccgatgtttaaaccggtgttgacgcgcaacggcgactattttatctcggtgatggggcgttcagacgtggcgcgtaagcaggctgccaacgtgctggtttccattcatgccgatgcggcaccgaatcgcagcgccaacggtgcttctgtctgggtactgtctaaccgtcgcgcgaacagtgaaatgggcaactggctggagcagcatgagaagcaatctgagctgctgggcggagcgggtgacgtactcgccaacacttcagccgatccttatctcagtcaggcggtgctggatttacaatttggtcactcccagcgggtgggttacgacgtagcggtaaaagtgctacatgagcttcaagccattggttctattcataaacgtaggccggaacacgccagtcttggcgtgttgcgttcaccggacattccctctttattagtggaaaccggctttatcagtaatggtacggaggagcggctgctcggcagcagtgcgtatcaggataaaattgcccaagcgatttacaaaggcttgcgcagttatttcctgtcgcatccgctacaagccgacccaaaggtcgaaaaccgtccgctgggcgcaacagcggcggttgaaaggtcagcgcgtcaaagtggtgttaatcagcctggcccggtagtcagtgcggtcagcagtggggggaaagccaccattagcggtaaatcgctgattcacatggtaaaacggggtgaaactctatccggcattgccagccagtacggtgtcagtatggcggcgatgcggcagaataatacgctgaagaaagacgtggtatgggttgggcagcgcctgcgaattcccgcatctggcagcgcggtagctagcgtcgccaaggtgcctgcggtgaagaaaatcagcccggccaaaccgatcaagcatcaggttaaacgcggggatactttatccgctattgcggcgaaatatggtgtatctcaaagtgagattcaacgcgtgaataagctgaagtctggttcggtacaactcggccaaacgctcaccattccacagtcttaaccgaagggatttgttatgccgattcagatattaccgccacaactcgccaaccaaattgccgccggtgaagtggtagagcggcctgcgtcggtagtaaaggagttggtggaaaacagtctggatgctggtgccacgcgaatcgatattgatattgagaaaggtggcgcaaaattaatccgcatccgtgataacggctgtgggatagctaaagacgacttatcgctggcgttagcgcgccatgcaaccagtaaaatcagttcgttggaagatctggaggccattctcagcatgggctttcgcggtgaggcgttggccagtattagctcggtttcccgtttgatgctgacctcgcgtaccgccgaacagaacgaagcctggcaggcttacgccgaagggcgggatatggcggtgaccatcaaacccgccgcccatccggtaggcagtacgctggaagtgctggatttgttttataacacgccagcgcggcgtaaatttatgcgcacggaaaaaaccgaattcggccatattgatgaagtggtacgccgcatcgcgttggcgcgcttcgacgtggcgattcacctcactcacaacggcaagctggttcgccaatatcgagcggccccagatccttcgcagcatgaacgtcgtttggccagtatttgcggcccggccttcctgcaacatgcgctggcgatttcatggcagcacggtgatttgaatattcgtggctgggtggccgaccccagcgctgcccgaacgcctagcgagatgcaatattgctatgtcaataatcgcatgatgcgcgatcggctgattaatcacgctatccgtcaggcttatcaggatctgctaaaagacgatcagcagcccgcttatgtgttgtatctggatattgatcctcatcaggtggatgtgaatgttcatccggccaagcatgaagttcgcttccatcaggcacgtttggtccatgattttatctatcaggcggtgaccagcgttttacagcaaagcgcagaaccagcgctgattgtctccgaagatggcgaaattgaagccccgcgctggcagccggagaatcgggtggccgctggtggaaataaatacgctcagccacagccggaaaaaacagccattcagcagcaatacgtggctccacgggttgccaatacgggttctcatacttctgcacgtgagcctcgagcgccagcctatacgccgccagcgccttatcaaaaacagcagggtgaactgtatcgcgaattgctgaaaccggctcctgcgacggataagttgccagaacaacagcctgcggcagtgataaaaagcagaaaggatgaagaaccgctgcgcagcggacaatacagctttggccgggtattgacggtgctgccaccctgctacgcggtgatagaatatggtcagggcttggcattgctttctctaacggttgccgaacgctggctgaaacaggcgcagcttaatccgccagaggaagggttgcgtccgcagccgttgttgattccgcttaaactgactttggataaaaacgaagccacggcctgccagcatcaccagaaattattgattaccatgggaatcgaactggcgattgaacacggacgagcgacgctacgtgcagtatctttaccattacgccaacaaaatttacaaaaactgataccggaactgttaggctatctgtcgcaacataaggagatgtcgccggaggtacttgccacctggattgcccgccgccttggcagtgagcatgaggtctggaatgtatcccaagcgatacaattattgacggatgtcgaacgtctttgtccgcagctggtgcaatcaccccctgccgggcttttacaacctattgatatacaggccgcattggcaactttaacccatgagtcatactgagaatttgaaccggcccccagctatattcgtgatggggccgaccgcttccggcaaaacggcgctttctattgcgctgcgtcaacatttgcctgtggagcttgtcagcgtggattccgcgctaatttatcgcggtatggatatcggtaccgccaagcccagcgcagaagagctggcgctggctccccaccgattaatcgatattcgcgatccggctgaatcctactcggccgctgatttccgtaaagatgctctgaaagaaatggctgaaattaccgccgccgggcgtattccgctgctggtggggggcacgatgttgtacttcaaggcgctgttagagggactgtctccgttgccttctgccgatccagaggtgcgccagcgcattgaggcacaagccgctgaacgaggttgggaagctctgcatcagcaactgactgaaatcgatccggtttctgccgtgcggattcatcccaatgatccccagagactttctagagcactggaagttttttttatttcgggtaaaactttaacggaactgactaaaatttcgggtgaaaccttaccttatcaggttcaccaatttgcgattgcgcctgctagccgcgagttattgcaccagcgtattgaattacgttttcgtcagatgctggatgcaggatttgaaaccgaggctcgggcgctttttaaccgtggagatttgcatacggacttgcctgccattcgctgtgttggttatcgccagatgtggtcttatctcgctggtgagattgattatgacgaaatggttttccgcggaatttgtgcgacgcgtcagttggcaaagcgacaaatgacctggctacgaggttgggaatctgttcattggctcgacagtgataagccggaacaggctttagactctgtaatacaggttgttagtgcataggttgaatgattgtgtacaattgattagtactcagcgcgcagattttttttacgcagtttattttcgagccgataggttcttagttaaaaacaacaagcaaataaggaaaatatagaatggctaaggggcaatctttgcaagatccgttcctgaacgcattgcgtcgtgaacgggttccggtttctatttatttagtgaatggcattaaactgcagggccaagttgagtctttcgatcagtttgtcattctgttgaaaaacacagttagccagatggtatataagcacgctatctctactgttgtcccgtctcgcccggtatcgcatcacagcaataatccgagtggcggcaccaataattatcatggtagtaatccgtctgcgccgcaacaacagcagcaggatagcgatgacgctgaataaagcgtattgctggtcaaccatgacggagagcataagcaacattgattgtcttatgttctccgcactagcggtttttacccgtttgagaggttgcacgcttgtttgaccgttatgaagccggtgagcaggccgtactggttcatatctatttctcgcaagacaaagacacagaaaatctcagcgaattcgaatcgttggtatcttctgctggcgtagaggcactgcaaattgtgacgggcagtcgcaaagcgcctcatcccaaatactttgtcggtgaaggaaaggccgaagaaattgcagatgccgttaaggccagtggcgcatctgttgtcctgtttgatcacgcactttccgccgcgcaggagaggaatcttgagcgcctgtgtgaatgtcgggtgatcgatcgtaccggattaattttagatatctttgcccaacgggcgcgtactcatgaaggtaagttgcaggttgaattggcgcaattgcgtcatattgcaactcgactggtacgcggctggacgcaccttgagcgtcaaaaaggcgggattggcctgagagggccgggggaaacccaactagagaccgaccgccgtttgttacgtgaccgcattagcttgatcctcaatcgcctagagcgcgtggccaagcagcgtgagcaaaaccgacgcgctcgcaaccgggctgaaataccgactgtttcgctggtaggatataccaatgccggcaagtccagcctgtttaaccgaattacgtctgccgatgtttacgcagccgacaaactatttgccacgctggatccaacgctgcgccgtattaatgtggcggacgttggcgatacggtattggcggatactgtaggatttattcgacatttgccgcacgatttggtcgccgcattcaaagcgacattacaagaaacgcggcaggcttcgctgttattgcatgtgattgatgcagctgattcacgcgtgagcgagaatgtagccgcagtcgacaccgtgctagcagaaattgaagcggacgaaatccctacgctgttagtgatgaacaaaatcgatatgttggacgatttcgagccgcgtatcgatcgcaacgaagaaaacctgccggtcagggtttggctctcagccgaaaccggcgcaggtatcccgttgctctttcaagcgttgacggagcgtctttctggtgaaatcgcacactatgaattgagcttaccgcctcaggctggccgtctacgtagccgtttttatcagcttcaggcaattgaaaaagagtggatagaagagggcgggcatatcggtatggtggttcgactgcctatcgttgaatggcgtcgtctctgtaaacaagagcaggagctgatcgactacgtcgtttaattggccctttgggttaatgaaagagtcgggtttgatcgaacttgtgagattgagggccagcttcttatagggaagtgcgctcttggcctgaagaaaaccaatcatagaagaatggagctaaaacatggcgtggaatcagcccggtaataacggacaggaccgcgacccgtgggggagcagcaataataatggcggcaactctggcggaaataataataaaggtggccgtgatcaggggccgccggatctggatgatatcttccgcaaactgagcaagaaactgagtagtttcggcaaaggtagcggaagtggtaacggtggcgcaacacagggtcctggctttagcggacgcattgtgggtatcgctgcggtagccgttgtcgtcatttgggccgcaagtggtttctataccattaaagaagccgaacgtggcgttgtgacacgtttgggcaaactgagccatatcgttcaaccaggtttgaactggaaaccgaccttcatcgatgaagtgaccccggtaaacgttgaatccgtgcgcgaattggccgcttcaggcgtgatgctgacatccgatgagaacgtagttcgcatcgaaatgaacgttcagtaccgtgtaaccgatccggcagcttatctgttcagcgtaaccaaccctgatgacagtctgcgtcaggcaacggacagcgcagtgcgtggtgttatcggtaaatacaccatggataagattctgactgaaggccgcaccatcgttcgtagcgatactcagcgcgtattggaagaaaccattcgtccatacaacatgggtattactttgctggacgtcaacttccaggccgctcgtccgccggaagaagtgaaagccgcctttgatgatgcgattgctgcacgtgaaaacgaacaacagtacatccgtgaagcagaagcttacgctaacgaagttcagccacgtgctaacggtcaggcgcagcgtctgttagaagatgctcgtgcttatgccgcgcgtaaggtgctggaagcgcagggtgaagtcgctggctttgccaagttgctgccagagtacaaggctgcaccagaaattactcgtgagcgtctgtatatcgaaaccatggaaaaagtcctgggtcatactcacaaagtattggctaacgacaagagtaataatctgatggtgctgccattagatcaaatgctgcgtggacaggccggtgcggataaagccggtgctagcaaagactcaagtctgattcgtttgaatccgtcttcctctgcggcaagcagtccggagaagagcgcgactagctcagactctggctctgtcatggatcagcgccgggcaaacgcccagcgtgacacttccactcgcgtagggagagaataatcaatgcgtaagtcgatcttattcgtcgtggctgtggtgctgattgcgctctatgcttcattattcgtggtacaggaaggccagcgcgggattgtgctgcgtttcggtaaagtactgcgtgataacgataacaaacctttggtgtacgcaccggggctgcatttcaagattcctttcattgaaacagtgaagaccttggatgcgcgtattcagaccatggataaccaagctgaccgcttcgtgaccaaagagaaaaaagacctgattgtcgattcatacctgaaatggcgtatcagtgattttagccgttactatctggcaaccggtggtggcgatatttctcaggcagaagtgttattgaaacgtaagttcagtgaccgcctgcgttctgaaatcggtcgtttggatgtgcgtgatattgttacggattctcgtggtcgcctgacctctgatgtccgcgatgcgctgaataccggtaccgtagatgacgaagccgttactaccgaagccgataatgcgattgcttccgtagctgcgcgtgttgaagaggaaacccgtggcaaacagcctgcggtgaatccgaacagcatggcggcactgggtattgaagtggttgacgtgcgtatcaagcaaatcaacctgccggctgaagtttctgatgcgatcttccagcgtatgcgcgctgagcgtgaagcggtcgctcgtcgtcaccgttcacaaggtcaggaagaagcggaaaaactgcgtgcaactgctgactacgaagtgactcgtactttggcagaagctgagcgtcaggcgcgtattactcgcggcggcggtgatgcagaggcggctcgtctgttcgcagatgcattcagtaaagatccagatttctatgcctttattcgtagcctgcgcgcctatgaaaatagctttaacagcggcaacgatgtgatggtgttgagtccggacagcgatttcttccgctatatgaaatctccggataattccagcaaacgtccgtaagggggttcgcgtgtgatgcaaggcccgttaacgcgggccttttctttttgaggcagataatgaactccacaatctggttagcactggggctggttttggtgcttgaagggctaggtccgatgctctatcccaaagcatggcgtaaaatgattcaggcgatgacgcagttacctgactccacgctacgtcgttttggcggtgcattagtggttgctggcgtcgtcatctactacatgttgcgtagccgcatgggtggctgaatccaagcgcaaaaactgtgcaagcatgtgttaaaaagtgctgaaagcacacgggtgagatgttagaatccttttttaaggcaacctggtgatttttgagatgggtaagaacgtcgtcgtactgggcacccaatggggtgacgaaggtaagggcaaggtcgtcgacctgctgactgaacgggctaaatatgttgtgcgctatcaaggtgggcataacgctggccatactttggttatcaacggtgagaaaaccgttcttcatttgattccctcaggtattctgcgtgaaaacgtaaccagcatcatcggcaacggtgttgtactggctcctgatgcgttgatgagagagatgacagggttagaagcgcgcggcgtaccagtacgtgagcgactgttactctctgaagcatgcccgctaatcctgccatatcacgtggctctggataacgcgcgtgaaaaagcacgtggttcgaaagctattggtaccaccggtcgcggtatcggtcctgcctacgaagataaagttgctcgccgcggtctgcgcgtgggtgatttgttcaataaagaaaccttcgctgcaaaactgaaagaaattgtggattaccacaacttccagttggtgcattactacaaagttgatgcggttgattatcaggaagttctggatagtctgatggctgtcgatcctcagaccggcgtttctgttgccgatatcctgactggcatggttgttgacgtttctgaactgttggatagcgcccgtaagaaaggcgagctgatcatgttcgaaggcgcacaaggcaccttgctggacatcgaccacggtacctatccgtacgtgacttcgtctaacaccaccgcgggtggcgttgcgacaggttctggtatggggccacgttacgtagattacgtactgggtatcatgaaggcttactctactcgcgtaggtgcaggtccattccctaccgaactggaagacgaaaccggcaaattcctgcgtacgcaaggtaacgaatacggtgcgactaccggtcgtgaccgtcgtaccggctggctggatatcgttgccgttaagcgcgccgttcagatcaactctctgtcaggtttctgcatgaccaaactggacgtgctggatggcctgaaagaagtgaaaatttgcgtgggctaccgcatgccagacggccgcgaaatggatacgactccgttggcagctgaaggctgggaaggtatcgagccaatctacgaagttatgccaggctggtcagaaaaaaccttcggagtgaaaaagtacgagcagctacctcaggcagcgttaaactacatcaaacgtgtagaagagctgactggtgttccggttgatataatttctaccggcccagatcgtgacgagactatgatcttgcgcgatccatttgatgcctgattgatagatacaccgtcaaatccatgcgatcaaaatactcaaaccgggcttatgcccggtttgttgttcctcgataagcagtttttacgccaaaaacctccgcctccacctaaatgattagccgcaagctttgtggctggtttatcattcaaagaatacgctttcataaataacacttagactggtgtcatcgcagatgagctttagcagagtacactgatactcaggggtatacgtgcagttaacaagttttactgattatggcctacgggcgcttacctatatggcttcgttaccgccggggcagatgactagcatctctcaggtgaccgaggtctatggggtatcgcgcaatcacatggtgaaaattatcaaccagttgagccgtgccggattagtgaccgcagttcgaggcaaaaacggcggcattcggttaggcaaaccggcagaaagtatccgtatcggcgacgtcgtgcgtgaacttgagcctctgtctttggtgaactgttgcagcgatttttgccatatcaccccagcctgccgtttgaaacaggtgctccaccaggctgtacagaatttccttaaagagctggataactatactttggccgatatggttaaagataacgctccgctctacaagttattacttgttgaatagtgtgtttgcttaatgaataacgttgagcaacctgctgatgactacggaggaaccgcaatgtcacaagatcctttcctggagcgagaagcagagaagtatgaatcaccgatcccaagccgggaattcattttagagcatctcgccaaacgcgaaacgccagccagccgtgaagagttggccacagaactcaatttatccggcgaagaggctttagaagctctgcgtcgtcgcctgcgtgccatggagcgcgatggccaattaatctttacccgccgtcagtgctatgcgctgcctgagcgtcttgatttactgcgcggtaccgttattggtcaccgtgatggtttcggtttcttgcgagttgaaggcagcaaagacgatttttacctgtcctcagaccaaatgaaaatggctattcacggtgacgtggtgctggctcaggccatgggtgccgatcgtaaaggccgtcgtgaagcgcgtattgttcgtgtattagtgccgaaaaccagccagattgtaggccgttactttaccgacgcaggcattggtttcgtggttccggacgacagtcgcctcagctttgatatcctgattccgccagattccatcagcggtgcccgcatgggttacgtagtggtggtggaactgactcagcgcccaactcgccgcagtaaagccgtgggtaaaatcgttgaagtgctgggtgaaaacatgggcaccagcatggcggtggatatcgctttgcgcacccatgaaatccctcatacctggccaccgcaggtggagaaacaagtcgcagatttgaaagaacaggttcctgaagaagcgaagaaaggtcgtgtggatctgcgggatctgccgttggtcactatcgatggcgaagatgcacgtgactttgatgatgcggtgtactgcgagaaaaaacgcggcggcggctggcggctgtgggtagcgattgcggacgtgagttattatgtacgcccgcgtaccgcactggatgacgaagctcgcgctcggggtaactcggtgtacttcccgtcgcaggtcgtacctatgttgccggaagtgctgtctaacggcctctgctcgctgaatccgcaggtagaccgcctgtgtatggtgtgtgagatgaccgtctcctcccaaggcaaactgtcttcctataaattctacgaagcggtaatgagctcccacgcgcgtctgacctataccaaggtttggcgaattattgatggcgaagaatcattgcgtgagcaatataagccgttggtaccgcatctggaagagctacatgcgatgtataaagcgctggatcacgcgcgtgcagaacgtggcggcatcgccttcgaaaccgaagaagccaaatttatcttcaacgcagaacgtcgtatcgaacgcatcgagccaactatgcgtaacgatgcgcataaactgatcgaagaatgtatgattctggctaacatcgcggcggcgcgttttgtcgaaaaacataacgaaccggctttgttccgtgtccacgatcgtccaagtgatgaccatatttccgcactgcgtagcgtgctgaatgagctgggtctggtattgggtggtggaatgaaaccagagccaaaagactatgcggttctgatggatgaggttgccgatcgtccagatcacgaaatgctgcaaaccatgctgctgcgttcgatgaaacaggcgatttacgatccggaaaaccgcggtcacttcggtctggcactggcatcttacggccactttacttccccgattcgtcgttatcctgatttggcgatgcaccgggcaattaagtatcagctagccaaagagcagggttcggtgaaagaacgttggacaccaaccggcggctggcacagcgattacgaagatatgctacaactgggcgaacattgctctatgactgaacgtcgggctgatgaagccacgcgtaacgttgctgactggctgaagtgtgacttcatgcaagatcaggtgggtaaagtgtttaccggtattatcgctagcgtgaccggttttggcttctttgtgcgtctggacgatctgtttatcgacggtttggttcacgtttccagcctggacaacgattattaccgctacgacaatataggacagcggctgatcggcgaatcttccggcgtggtttaccgtttaggtgacaccgttgagattcgtgtggaagctgtccacatggatgagcgtaaaatcgactttgctttggtatccagcacgcgtaaaccgcgcggcgaagggaaaacggcgaaagacagagagaaaaaagcgggccaacgtaccatgcgtggcagcgcaccttcacgtcgtgaaggcggacaatctcgtcgcggtgctgccgatggcggcgcgagtagtggacagaagcgtaatcgtcgaggcaagaaaccggctaattttgagcctgatagcgctttccgccctgatgctgacaagccaactgacaaagcggctgcggagaaaaaggccaaagcgaaaaaaacgtctgaaaagacccggaagattgcggcggcgactaaagccaaacgagctaagaaaaagtcagccagttagtatccacagggcggcggagcgtcgccctgatcaaagcctaacccttagtgttacgcattatttaatcaacggcgggtcctgtataggattcaccgacacatgtaaaagagcatcatgagcgaaattatttacggtattcacgccgtcaaagccctgttagaacgcgatccgcaacgttttctggaagtttttatcctgaaaggacgggatgaccgtcgtttgcagccagtagttgcagagctggaggccgctggtctggtggtgcaggttgctagccgccaatggctggattctcaggtagaagacggtgttcatcaggggattgtcgcgcgtgtgcgggaaggccgtcagtatcaggaaaacgatctgccaagcctgctggccagcgtagaatcgcctttcctgttggttttggacggcgttaccgatccgcataacctgggagcttgcctgcgtagcgccgacgctgctggtgtccatgcggttatcgttccgcgcgatcgttccgctcagctgaatgcgacggccaagaaagtagccagcggcgctgcggagaacgtccctttgattcgagtgaccaatctggctcgtactttgcgcgtattgcaggaaaataatgtctggatcgtgggtaccgcaggggaagccgatcatacgctgtatcaaagcaagctgacggggccaatggctctggtaatgggcgcggaaggcgacggtatgcgtcgcttgactcgtgagcattgcgatgaattaatcagtattccgatggcggggaccgtatcttctctgaacgtatctgtggcgaccggtgtgtgtctgttcgaagttgtacgtcagcgcggtttgaaagctaaagcctaattattttcatagcgccatatttttaaaacttaatgttgttaaaggcagttcccgcgggggactgcttttttttgccttaaatatactcaaagatatatttaacacacaattaaaacagatagttaacgatgtttccatgatttaataattcagcaaatagatattattatattttataaagtcctaatgaaatctaataactattaattacggattgttcctattcatcagtatatttatccagcagtaagcatttatgtcagtgatcataaaatgcattacttctggtgtctttttatgtacatggagagttatgaaatggaaattaaatctataagattcaaaacaattgctgctctgatcctttcagctgcgttaactcctgcagcctttgctgcggataacagcgcagaaattacggttaaaggtaaattgatgccgggtgcctgccaattggatgtaaacggcggagaaattaattatgggaatatttctttacaggagttggttgaaaaagaagaaagaatcatcgatttaggaaagagaaatattgagtatgctattaactgccctcataagacagcagtatcgatgagctttgtcgataaccgtaaaggtagtgttccggctgaaattggtacctcttattttggtttgggtgaaggtgctcttaatatggatgatgtaaaggtcggttttggtggttataaagtctcactgaccgaacctaaagttgatggagagtctgcgcttctaggcggtattaatgatgttgaaggacaagcatcggtcgacttagataagtttgaagatcagaatattacttatttcaacgctgataaaagtatttttgaaggggcattattttcgggtcgctataacgtagatactaaaatcatcaatcctaaagagtttaagggaggttctagtattgaacttgatggttccgttaccatgaatgtgtcttatctctaataacctctgttaattaaatgggtgctgtatggcatccatttattgctattctattgccatgataagtaaagaaaataaggctatagggatataaatttatataataaacggataatttatgatgaaggttaatctggttttatcagtggctattttattttctatcgcaagtttttcccgcgcgaatacaaccggctcttcgactccgggtatccaaattaatgactcagtgattgtcattaatactgcggaaggtgaagcgaccactacgttgaccaataaggccgctaacccggtaatgttacattcttccgtggagtttgtagccgaagataccgccgagaaagtgattgtcacacccagcgttgcccgtattgaagccggcgagacacaaatggttcgtttcttcctaaaggacgaatttagaaactcactgactcagcaaaccatggtcagagctatattccagaatattcctcctaaaggaaagaataacgttcgtttgaccattagacacaacattccgttgattattcatccttccggtttagcaactcacaataaaccttgggagtttcttaagttcagtcgcaatgcacaagggaacattcttgtgaaaaatgaaggagactatgtagtccgtttatctaattctattgagttgcagccaggaaagggggctgctgagttaacgcagaattatattttaccaggaaagagtctggtggctattacggataaggcatttaaaggtcaggcgaatagcgtcagaatacaaccagctaatttatacggatatattactgagtcctattcttccgaactgaaatgatcgttagataatatcgatgtaaagctcgttgtatcacacggagatagaaaaaatgaaaccgaagaagaatagcattcggttatttttatatttcagcatttttcttatttccgtgagatctttggctgatgatggcgttgagtttgatattggtattcttgaagaacgcggtgtttctgccagtgcggcagactactttaaatataaagccagatttagctcaggagatcattccattgagttaactattaatggtgtagctcgcggctgggtagatatgacgtttaatcagcagggtgaaccgtgttttagcccggatttttaccaaaaaagcgggattattcctcccccaatggaaaacggctgtagtgatttacggctacattatcccagagctttggtgaatttattccccagtacgtcacgtattgaagtgattctcccggcggaattattacaagtcggtgaagttgttacggggaattatgaaaccggaggttcagcgttgttaatgaattacgacgcactggcgataagaaatcagaacggtagcaataatctgcaagcctccacggaggctgggtttaatagcggcaactggatttttcgttcccgtcagatctttagctataaggatcggcgacagcaatggagcaggctatatagttatttgcagcgtacttttatcgaaaaaaaaacgacgttgcaaatgggagaaattaacctgaatagcggcttattcagtacgccacaaatttacggattgcagataatgcctgaaagtgctttagccagcagagaaggcagcggagcaacggtgtcaggcattgcgccaacgcaatcaagcgttgagatacgtcaacgcggagccttgatttacgtgactcagttgccgcccggccccttcactttaacccaaattcctattaattccaccggtgcagatttattggtatcggtgataggcgtggatgggcagactcagagtttcagcgtgccggcggcgagtttcaacttgcagtatgttcccagaacgcgcggtatttatgccggaatgggtagaaccgggccaggttctaatcagcatcaggaaagctggctaggaacgttgacagacgttcgcccgttaggcgacttatcggatattactcagggtgttttgctgggttcccgttaccactctgccggattggcagtaaataccggtttgattccccgaactttttgggcggtgaatgcggtgaccagttgggatcgccagaatgaaaaacaaggcgttcaatggggtagccacgttggcgtgaagctggtttcctcattgaaactgaatttatcgactatgcatcgaacggctggatttcgccagtttcagcatagtttgcgagaaaggccagtggcggagttacccgcagtagagccaaagaataaaaatcctaacgcggataaaagtggcgttaagaatcaatacagggcgcagttaagttatagccaatcgttgttgggcggaatcagtctgggttatacccaatcggtatcttttgctaaacagcaggaacgccgttggagtttggggtggaataaacagctgccttacaacattaattttaatctgaatatggaaagaaacctgaatagcaaaggagacaagattatctatggaaatatcagcattccgctgaattctaatatgtccttaagcagcaccgtttctcaaagcagaggaagaactcagcaacgcgttggtttgaatcatcaggttaataatcagttgggttacagtctgggggtaagtcaaaccgcgaatcaatcggggcaggcgctcagcggtacgctgagggtattacctaaatatgctcagttaggcgtgggttattttcaggatagcgcgcgaaatagcagctatcagcttcaggccagtggcggcgtggcggtgcatagtgcaggcgtgactctttcaccttatgcgattcaggatacttttgccgttatcgcgctgccgggcatcagcggtgcagaaatacaaactaattcaggtccggtatggaccgatcggcgaggctatgcgttggctcccagtttgtcgccgtttagctcctctcggctagaagttaacactaagaaactggcgcgaaatatcgatattaagaatggtattcgattagtggatgccagccggggtgcggtacttaattataatttcaaagcaaataaaactcggcgaattttgctctcgatacgccttgcatcgggggagtatgccgctgaaggcagtgatatcacggataaagaagataattatgttggcactgttggtagcaaaggaacgttgctgctgagcaatagcgacggaaatccggacttatacattaaggacaatgaaaatgagatatgccagttggattacagtctgcctgaggcaaaggatgcgccggttttatatgaagaagctgatgcccgctgcctgtaaaaatactcccttcagcggcggttttaaactggcggtagcggccctactgctaagttttaccggaacggcactggcgcagtgccacatcagcgtgactcaatcccaactgcatttcggctccctgcctcgtgcccagcttaagggcgcgaccgatcgcggcgtcagtttgggaaaacactatttcaatgtcgatgtgcagtgtccgcagccgcgtttatttgccatcgcttatcaagggaatagccaaagcggcgaaagctattctttggattcagaccacgccagagttgagctgacgccttctgccgcgcaggctgatgggcaaccggtcatattgtatctcggcgctcgctctgcttttcccgcagggaataatgcggaacacgccagactccccctgcatccattgactcgaaatatgatttaccccggtcggcgagcggttagccaattaagttttcagatgacggcagaagtgtggctggcggcaaatgcacttaaccgcggtgaacgggttcacctgaatggcattggcacttttgacgtgatggagtaccaataatgaaccgttctctcaatagatattttgctcgttatctttcgattgtagtgggaacggtgagttacctatttgctcatttggctagcgcagagacttctgtcagcatttatttcagcgctgaaatcgagccggtagcctgtcaggtttccatcgatagcgccgttgattatggcgaaatagctcagtccaagctctctgaaacccactttactgctttgtcgcatcgggcgttgccgcctatcagcgtggaatgtgacgccaaaactgcgctgggatttaaggcgacggataaccgttccggcatcgcgacggatgccagactgattggcagcagcggtacggttattccgccagaacatcattttagtcttgggcgaacctcagacggacagccgattggtgcctggggcgtgatattttcttccggcacggtggatggccgcacggcgttgattgccggaacctcggcggagccattccatgcggcgaatacgttaaacccgaaaggaaaagtggctcaatggatggagaatggcactctcgctattggtgaaacctttacgctgcaaggggaagttgtggccggtattgcgaagaaatccgaattacctagcggcgatattattgttctggatggcatggctacgctggaaattgtttatttgtaaattagttagctgtaaatagtgggcgattaactttacgctttctcccgcattatctgtggtgatgatcggcaaaagtaccaggctgaaccatacttaatcctgatttttatgctaatgaatctgagggagaaaggtatggattggcggacgcacgaagtgttcaatcagcctgagccattatcaaacagcaatttatttttgtctgatatggcgttaagggaagctgtcatacgcgagcaagccggttgggataatgaagtattaatttcaatgggcgcgcagttgggatcggcagaatcgctggagttagggcgtttggctaatacaaatcctcctgaactattacgctttgacgcagctggacggcgtctggatacggtcaggtttcatcccgcctggcatgttctgatgaaagggttggtaggcaatcgggtgcataatctgagctggcaagaagatgctcgtatcggatctgtggtggccagagcggctcgtttgatgctgcatatacaggttgaggccggaaccctttgcccgataaccatgacctacggtgccattcctcttctgcaacaatccctacctgcgcaatttcaatcctggatatctcctttactctccgatcgttacgatcctcacgtcgctcccggtgatcaaaaacgcggtttattgatcggtatgggaatgacggaaaaacagggggggtctgacgtcttgagtaattccacgcgagcagagcctttgggcgctcgcggtgccggtgaagcttatcggttagtcggtcataaatggtttttctccgtgccgcaaagcgatgcgcacttggttttggcgcaggccgaaggtggattatcctgtttctttatgcccaaaattctgcccggcggcagcagtaattccattcgtttagaacgcctgaaagacaagctgggcaaccgctccaatgccagcagcgaagtagagtttgataatgccatcgcctggctattgggcgatgaaggggaaggcatccaccatattttaaaaatgggcggccatacccgtttcgattgtgcgttaggcagccacggcattatgcggcgagccttttccgtcgctctggattatgccagccagcggcaggcctttggtaagaatctgaccgaccaacctttgatgcgtcaggtgctcagccgtatggcgctgcgtttggaaggccacacggcgctgttattccgtttggccaaagcatgggaacacggcagcgcggaagacgcattattcagcaggctgatgacgccggccgccaagtataaaatatgcgggcagggcagcgcttttgtcgccgaagcgatggaggtgttaggcggaatcggctattgcgaacaaagcgaattgccgcgcttataccgtgaaattccggttaacagtatttgggaaggctccggcaatattatgtgtctggatgtgctgcgggttttgcgcaagcagcccgcagcgatagaaatgctgaatcaaaatttttatgaagttcgcgggcagaatcgtttgttcgaccgttcttggcgccagttggctttccggttaaaaaatccgcaggaagcacaggggcgagaattgacgctgcaactgtttaatctgaactgtgccgctcaattgttgcgttttgcatcgccgtcgctggccgacgcatggtgtcgtatgatgctggatcatcgggatcaatattctattccggaaccgctttgcgaactgttactgacccgagccgcagccgtttagcgatacagaatggcctgtgagtaccactgacccggaatgacagaatcgctattcataatgactaaatagtaacgggctccgctggcattggctttgctacggagtgccgcttcagcatccatcgggctgccatatacctgcaccgaagccatcccgattttttgtaatgttccgctttgagctcggttaatttcctgcgcgaaaggctgtggcgcgggaggtggtagcggcgtggttttcaatgcgctacaggcggaaaggctcagtgtgaacagtagaacgacaaaggcgcgataataggtcatggtgtgtttcctgtgttgatattgccccactttctctcagtgtaacgctcaaacattcataacgaccagatatgtgtcatttctgatatatctcggaggagattggtttaagactttattcagcaggtttggcactatggcggtgcgtttacaattggtttggctgataaggcttgtttgacccataaggactgttgttatggttgaaatgtcgttagaaaaagtacagggcattgaggtaattcacgccgcgccagcaggccagcgtcatcagcctttgccgacccttttcttctatcacggttatacctcctccaaagaagtgtattcctattttgcctatgctctggcgcaggcgggatttcgcgtggtgatgccggatgccgatatgcacggagccagatttgacggcgatgaaacccggcgactaggctgtttctggcagattttgcgttcaaatattgatgaaatggctggaattaaagaacactatcaacaaactggattaattgatggcgatcgaatcggcgtgggcggcgcctcaatgggcgggatgactactctgggagccttggtgcgctatccgtggataaaggcggccgctaatttcatggggtcaggttatttcacttctctggccaaaacgctgtttcctcctttgcccagtgctggttcaacaaagcaggatgaatgggaacgacaaattgctccgttgattgaatatgaggtaacccaccaactggagagaatcgcccgcaaacctttgctggtctggcatggtgaagcggatgaagtggttccggcggtggaaagtgagcgtctggtcgcagctttgaaagagcaggggttggatcatcatctaagttacctgaccgagcctggtatcggccataaaatcacgccaacggcgctgacggcgggcgcggcattcttccggcactatttatagttatagccgctcatttattggcatttatttataggcactaaaggccagaaaaaacccccgatagacgggggttaagtgttttaagggctgtattgttttactgtcggtctttctctggtgttgtatttatctttgcaattctagcggtaaagaacagcgttaatctgaatagagctgttgccgccaggttcatgcatagcgatgatttgataggcggttgcgccgcgttcatcggctaatttgctaacctgtgaggttgcatcgtcaggggaaaccacattgtgacccagtgacactgcgccaacgctgacacgctgttgctgcattgcctgttgagcggtgatttcagtggcggcgaaagtgctggccgataggaagaaactgaggatcgcggcgatagtgagcgtgattttcataggtgactccaatattttatttatatactttgaataagtttcctggctgctgcgccgcttgttatgcggtggatgtaactaatagtagttctcttttataattaataaatgcgctattgctgactgactctttcaaaaaatatgaatgatttttgcgctgacctaatgattttgttgaaagatttaaaaaactaatggatctccatccatagttcatttggtgaacaaaaagtgctatttattggctagaacggatatagctcgaataattcctctgcaatccttgagtttccctcctcgcgcaagtatagttacgcgtcatttttcggccgcacacaaacacgttccttgcctccatgggccgcggctgaccctatcaggaggctgaataatccgtaaggagcaattcgatgcgtcattacgaaatcgtttttatggtccatcctgaccaaagcgaacaggttccgggcatgatcgagcgttatagtgcaacaatcactaacgctgctggtcagattcaccgtctggaagactggggccgccgtcaactggcttacccgatcaacaaactgcacaaagctcactacgttctgctgaacgttgaagccccgcaggaagcgatcgatgagctggaaacaaacttccgcttcaacgacgccgttatccgtagcatggttatgcgcgttaaaaacgcggtaactgaagcatcaccaatggttaaagcgaaagacgaacgccgtgagcgtcacgacttcgcgtcagaaaccaatgatgattctgaagctggggattctgaagagtaattgccgtggtggccgctaatcgactggtactctctggcactgtgtgcaagacacccattcgaaaagtgagtccttctggtattcctcactgccagttcgtgcttgagcaccgttcaacgcagcaggaagccggatttagccgacaaacatggtgccgaatgcccgtgattgtcagtggacaccagtcacaagcattaactcacagtataacggtcggcagtcagttaaccgtggaaggcttcattagttgccatcaagggcgcaatgggcttaacaaattggttctgcatgccgagcagattgaattgatagattctggagactagcctaatggcacgttatttccgtcgtcgcaagttctgccgtttcaccgcggaaggcgttcaagagattgactataaagacatcgctacgctgaaaaattacatcaccgaaagcggtaaaattgtcccgagccgtatcaccggtactcgtgccaaataccagcgtcagctggcccgtgctatcaagcgcgcgcgctacctgtctttgttgccgtacactgatcgtcatcagtaatcggccactgtccattaacgactttgagaggatatggtaatgcaagttattctgcttgataaagtagcaaacctgggcagcctgggtgatcaagttaacgttaaagcgggctacgctcgtaacttcttagtaccgcagggcaaagctgtgccggcaactaagaaaaacgttgagttcttcgaagtgcgtcgcgcagaactggaagccaaactggctgaagttctgtctgccgctgaagctcgcgcaactaaaattaacgaattgggcagtgttacaatctcctctaaagcaggggatgaaggtaaactgttcggctctatcggtactcgtgacatcgctgatgcagtatctgcagcgggcgttgaagtagcgaagagcgaagttcgtttgccgaatggcgttctgcgtaccactggtgaacacgaagttcacttccaggtacacagcgacgtgttcgcaaaactgaacgtagttgtggttgcagaagcgtaagttacgctgctgttaaccgttaaaacgccagcctcgagctggcgttttgcttttctgagaacgacaaaaaagcccctgtaaccctgccagttgcgataattcctttccagcatccagacgtagcgatatcacgccgcgagcctttggttgggcgcagatagcctacagagagagaaatgggtgacagcggcgtttggatcaaagcccaggccagattatggctgcaaaatctgggctttatcagtccttggcattcgcgctgaggattatcgatcgcggcggtaagaaccgtccgcttggcggctaaacaatacttccgcactgttggccgtttcaatagccagcgcggttacgctgccttgcgcgtccagtatgattttcacttcttgtccggctttcaggttgctcagtggcttatcattgccttccacctgcgccatggcaaacacttcatttaccggtaaattattatcgcggaacagctgggccaacgttttacccgcttgtacctgatagctttgccaattcccctgcggtaacgttgaggacggctggttgactgcgggattgctcccgcgtaattcggcctgtaacggaatatctgtcggttctgccgtcaccgggaattgcccgctgccgttgttaccggaagaaggccaaagcagtgccagcaacaataccgctgcggcaatgatgacccagcggcgatggaagagaggcaagggctccatccaatggaaatcatccggcagatgccagattttttgcagccagtctttaatcacggcttgctttcccggcgacttgatctgcggtgctgatactttgtcgtcatccattaccgtttctggcggtaagagatcgggctcgccaatggagggctcggctttgacgcggttttcaggctcatcggtcggtttatctggcagaattcgctgccggatagttagccaagtgtgtaacaaaggctggtagacccgattgtttttccttctcctgggcgcgattctgcccatggtgacctctctttcaacgacgtaaaaaaaatcacagtgctcgatcagcgactgctggatggaaccttttccctgttacttgttagtatagtttgctaactgattgatgcagaaagaaacagggataatgctgccgaacgggctgttttaagtcagtgcagaaccattgtttctttttcttcgacaaaagtcatcattagcgatgcaagattttaccctactcccttgctgctgttatgcttgcaccttcgactttttagagaattaaggaaaatccatgacaaccccttcttttgatagcgtagaagcgcaagcaagttacggtatcggtttacagataggccaacaattacaagagtccggcttgcaggatttgcagccagaagccctgttggcgggcttgcgcgacgcaatggaagggaatacaccaacagttcctgttgatgtcgttcaccgcgcgctgcgtgaagttcacgaacgtgccgatgctgttcgtctggagcgccagcaggcactggttgttgaaggcgctaacttcctggaagaaaacgctaaacgtgatgaagtgaccaccactgaatccggtttgcaattctccgtgctgcaacaaggcgaaggtccaattccttcacgtcaggatcgtgtgcgcgtgcattataccggtcgtctggttgacggtacggtatttgatagctccgtagaacgcggccagccggctgaattcccggttagcggcgtgatcccaggctggatcgaagcactgactttgatgccggttggctctaaatggcagttagcgattccacacaatctggcctacggcgagcgtggcgctggcgcatctattccgccattcagcgcgctggtatttgacgtagaactgctggaaattctgtaaattctgagcggttagtgtgaaaaagggcgatccaggatcgctctttttttatggcttttctacgacttagttgccacttaacgctctgggaaatagcagattattttctaagtgaacgtgttccatcaaatcgccgacgaattcgttgagattggcataaagtgcgcgccaggtggtgcaggctccaggtgggggcgtgatgttattggtgatctgtttgatggtttccaattgctgccctgccgcttcgtgctctgattccatcacgaaaatcggcacgctagccattttccccattcctttggcaatcatggggaataacactttttcctctctttccatatgctgtaataaatcctgatgtagcacgctgagctgcactgctaaacctcgtgggcaggtgggttttgcggcatgtacgcgctctaccttttctgccattaacaccagctccggcaattgctcgcggtgccgttcatgatagcggttgagaataaaactgatcaggtgctcctgtggaacctcttgccagttctgcactgcctgagtttctttttgcaacatggtgagctccgcttccaacgcgtcaatattcagagccctgcgctcggcggcacgttgtagtgtctgtttccctccgcagcaaaaatcgagttcataccggcgaaataacgttgtggctcgtggtatggcaatagccagagaaccgagagattgattgcggtaatccattatgacacctctttaatgtgtaacttctataagttgcattataaatgcatgttaatgtgtgtgccatagttattaagaggtagtaaggatgagggagaaagagcaaaagcgctccgtagagcgctttaaggagggattacttcttctgcaaatcgacctgataaacttcaaaaccaatgtcatccagtccctgtgccttcatgggatactgggatttttgcttgataaattcagcggctttggcacttggtgaagtttcaaaacgaatatccaacggctgcgaactggtgatttcggctagacgccagttgttatcagcctgaggcttaacctgaccgttcttcttggtttctgcgctgatataggcagagagtaccgaacggttctcatccggtgaagcaaaggcaatatggtcatcgccggtgcccgcgaatttgccactgtaagcgcggtagttattggtcgcaatcaggaaagtggcctttggatctagtggcttacctttgtaagtcaggtttttaatacgttcggctttatcgttgatcagattacagtcgccgttgtagcgagccggctgtgtcacatcaatttcatagttaacgccgtcaatcacgtcgaagttataggtacggaaaccgttccagttaattagcgactgcggtttgctgcttttcacatcgatctgattgaattgcccggcagagcattccagccactgcttcacctcagcgccgctggctttcactacgaccagagtattggggtagagatacaaatccgcggcattacggaaggttaaatcacctttttcgacttcaacaaaactggccggatcgtttttgcgaccgcctgctttgaacggcgctgcggcagaaagcacgggtaaatcggccagatccggatcgccctgaataaagtgttcggtataggcgcgctgagcgttgttgacgatctgtaccgttggatcgtcctgaatcagcgacaggaagctatacatattatcggaggcttttccgataggttggctgacaaaatcgcgggtgcctttatggtcatcggccagtactttaaccagcttggcgttttccggtgccagcgattttttgttggttttatcgtagatagggcgggcttctgccttcgcctgttcgacctgccagctacctttatcgttattcagtacaaagtctacaacgcctaaatggtcaccccattggcccggcattactgctggaatgccgtttagcgtaccttgcgctatatccgcgcctttaatcgcagcgaaatctttacttgggaagacggcgtgggagtgcccgaacataattgcgttgattcccggaacctggctgaggtaataaaccgagttctcagccatggttttatacggctcgctggataggcctgagtgcgggatggcgataatcaaatcagccccttgcttacgcatctccggtacccattttttcgcggtttcggtgatgtcgtctacacggactttgcccgtcagattggctttatcccagatcatgacctgtggcggaacaaaaccgatataaccaatgcgtaaattatgggttttaccgtcgcgatctttaaccggtgtatcggcgatcaggaaaggttggaacagcggtttaccggtttttacatcaatcacgttagcatttacataggggaattttgctcccgccagagatttcttcaggtaatccaggccgtagttgaactcgtgattaccgatgtttcctacggcataatccagcgtattcattgctttgtagaccggatgaatttcgccttctttcaatcccttggctgccatgtaatccccgagtgggctgccctgaattaagtcgccgttgtctaccagtacgctattaaccgcttgctgacgcgctgcgtcaatcaggctggcagtgcgaaccaaaccgaactgttcagtcggtttatccttgtaataatcgaaatccatcatgttgctgtggagatcggtggtttccaatacgcgtaaatcaaccgtagcggcctgagccgcgctggcaatcagacaggcgagtagggacaacgtcaggggacgctttatcatggctttctccattgtggctttccatatgagagctattcgacatgtatcgcaaaagcagatgtaattttaattaattgtggcaacaaagtgtgaagtttggcagaaagccagccagattaacgcgtagacgctcacagatgcggcaggttaatccccttgattttattacatgttaagttggcgatggctattaatggcaaaattcactagtctgctactcaagccgaattcatcctttaggtgaagtttattttggtatttacctctaaaataaatagagggaaaagggcgttgccgaccggtaacagccggactgcggtgagccgaacagcgacgaaaagaatgatagataacttcagaggtggatgatgttagagcaaatttgccagttggcacgcgatgccggggcggcgattatggccgtctacgatggagagaaacctcttgatgtagcacacaaaaaagatgattcgccggtaaccgcagcggatctggcggcgcatcatattattaaagccggtctggcagcgctgacgccgaatattcccctgttgtcggaagaggatcctccggcgtgggaaattcgccagcactggcagcgttactggcttgtcgatcctctggatggaactaaagaatttcttaaccgaaacggtgagtttaccgtgaatatcgcgctgatcgagcaaggcgcgccaatcttgggcgtggtgtatacgccggtgacggatgtgatgtacagcgctgagaacgggcaggcgtggaaagaggaaggcggacgtaggatgcagatccaggttcgtgatgcgcaactgccgctggtggtggtgagccgttcccacagtgatgacgagctaagagactatctggctcagttgggcgagcatcaaacggtatccgtcggttcttccctcaagttttgtctagtggccgaaggaaaggcgcaattgtatccacgttttgggccgactaacgtttgggataccgccgcaggccatgcggtggccgtcgcagccggagcgcaggtcaatgattggcagggcaaacctttatcttataccccgcgtgagtctttcctgaaccccggcttcagagtgtcgctgttttaagacttcagcaactggtgcagttgggcgatgacctgctgcacttcttccgcgcttaatgccccatctttaacgaaacgaacgttaccttgctgatccagcaccacgatggtggagcttttggcggccagatcccaagctttcttcacgttgccattgctgtcgacaataaactgcgaccagggaaactcacgcttactgtcttcaatgctgttacgcacaaacatagcagtgccgataatggcgtcatcggtatcgacgattgtcgtcgtttggtaacgatcgtgcggtaatttggcggccttgattgcttcaatcaagggggcattcatctctttggcactgctgcggccggcgatatgttgcaccacccggactttgccggctaattgcgagctattccagtttttatagctaaacttattattagccaaatccagttcacctttatcactaacacccaccggcggcacacgctgatcgagttgaatgttatgagccgaggcaagcaaaggtgtgaaaataagggaaagaatgagcaggctattttttatcatgtgatgtccttgacgatgctgaacgatggaattaggcacttgcgccgcgaattgaggcaagttttcaaatcataggtgcagatcagaggtctgtcctgtctgatgccgattttagtaatcgttactgtttagatggttattctgccttaacggccgtttatgttcgtgtgattctgtaattttatgtaaacacagtatgtatgactacttttggcggaacttagcgccactcttcaggtctattactctgcaattatcttacgctacctgtgatcctggtcgcttaggccattcgcggagcgtatttgtgtcatgggaggaaagcaaaaaaatgaggatcttccagcgttacaaccccgctaaagtcgcgatgtatgtcaaaaccctattccgcggtcggctatacatcaaggatatgggggcttttgaattcgacaaaggtaagattttgccaccgaaagtacgagataaacgccactatagcgtgatgtccgaggtcaaccgccaggttctacggctacaggcagaaatgggttgataaggcgtaaaagcagtagcgccgaatgaattgcggccccgataatggggccgctagtattttcagcaagtcattctgctcgtatcaatcaggcatcgctgctttcgtgcggcgctttgggcagaatgggagccggagtatcagtgagcttggtaaccagtagctgatcgatcttgtagctatcgatatcgaccacttcaaacttgtagcccgcatacttgacgaaatccgtgcgtttcggaattttacgcagcatatacatcataaaaccgccgatggtttcataattgccagactgcgggaactcatcgatatccagcacgcgcatcacgtcatcgataggcgtaccgccttcaatcagccatgagttttcatcacgagcaacaatctgttcttcctgcccctggccgactaaatcccccatcagcgtggtcattacatcattcagagtaataatcccaaccaccaatgcatattcgttaagaataacggcgaagtcttctccggcagttttgaagctttccagcgcttcagaaagcgttaaagtatccggaactataagcgccgagcggatttgtacgccgctgctcagtaccaaactctggttgcccagcacgcggtttagcaagtctttagagtcgacgtagcctacgacctgatcgatatggccgtcgcaaactaaaaacttggagtgcggatgagtcgcaattttctctttgatgctttcttcgctttcccgcaggtcaaaataaatcacgctttcgcgagatgtcattgatgacggaacggtacgggattccagctcaaaaacgttctcaatcagttcgtgctcttgtttgcgcagtaccccagctaatgctccggcttccacgacggcgtagatatcatcagatgtaatgtcatccttgcgaaccattggcaacttgaataaacggaaaatcaggttggccatgccgttgaaaaaccacactaacggacggcagatcatcaggcagaaacgcatcgggttgacgatccggacggcgactgtctctggtgcaatcataccgatgcgcttcggggttaaatcggcaaacaggatgaacaagctggttaccagaacgaatgagcagatgaaactgacctggtctgccatttctggcgacataaagcgctcgaacaccactttgaatgacggcgagaaagcggcgtcaccaacaataccacccaaaatagcgacggcattcaggccgatttgcactactgtaaagaaaatgcccggcgtctcttgcagtttcagcacccgaagtgcgttgatgtctccctcatcagcaagaagtttaagtttgattttgcgtgaagcagccagcgatatctccgataaagagaaaaaggcacttaccgcgatcagaaaaagaatcagtaaaatactgtttaacataatctatccgtgtcgtaccgacgattcagtcggcgatcgtaaggaagggtcatacataaaagttaaaatggcgggcaggaaagccgccattgggctgtgtcaacagcccggatagtatagcagcagcaatcagatgcccgctagcccctacaaattcggtggcaggcaaaccccaatgccccctaaaccacagtagccgtgaggatttttatacagatactgctggtgatcgtcttccgcataatagaaaggcaacgccgcagtaatctcactggtaatgatgcgcttatcaccggcgtctgccatcgcttgctggaatcgggcgcggctggcgttagcctgctgttcctgttccggggtcaatacgtagatagccgagcgatactgagtaccgatgtcgccgccctgacgcattccttgagccgggtcgtggttttcccagaaaatctgtagtaactggtcgtagccaatcactttgggatcaaacaccactcgcaccacttcggcgtggccggtgcggccgctgcaaacttcatgataagtcggatttggtgtatagcctccgctgtagcctgcggcggtgctataaacccccggttgttgccagaacaggcgctctacgccccaaaaacagcccatggcaaaaatcgcttctttcataccttctggaatatgagtcatcgagtggccatttacggcgtgagtagttgcaaccggcatcggggtggtgcgtcccggcagggcatcttgtgcgttaataacggctgatttttctgaattgtgcagcaaaatgaactccggttatcacagtgttaaaggatagatagttgtatctgattgcgagtttgcacacaataagaggcatattgcgttaatgtatcagcttaacgcagaatcttaggggcgacaggcttaaatcggtcttcataaagggaaatatggtgtgaaaacaccgtcatatatccgttagccggtgagatcgtttttttacaggaaagtaaaaattaatcaggagtacgcgtgtctcgataccctattgtgtgttttttgtgtgcattactcgcaacaccgtttgcttatgccgccaatgttcggctgcaggttgaaggtcttagcggggatttggaaagaaacgttcgggcgcgattatcaactatcggcaccgatgaagtcagcgccgatggccggttccgtgccagggtggacgaagcaatccgtcagggacttagagcgcttggctattacgatcccatcattgaatttgatttacagcccaagcctgcaccggcgcgttcaatattaatggtgaaggtcactccgggtgaaccggtattaatagccagcgttgatatcgtattacaaggcggtgcgaaaaccgatccttcctatctggctctggtacgccgggacacgccaaaaatcggttcaattctgaaccacggcgaattcgatagcttcaaaggttcgctgactaatctggcgttacgccggggttattttgacgctaacatgatcaaaagtcagttaggcgtagcggctgaattacggaaagccttttgggatatcgattttgacagcggcgaacgttatcgtttcggtacggtgagttttcagggttcacaaattcgcgaagattacctgcaaaatttggttcctttccacgcagggcaagattacagctcggacgatttagccgaactcaaccgccgtttagcggccaccaactggtttaactccgtggtggtttctcctgattttcgcgatgcgaagaaaagtaaaacattgccattagacgccgtgctgacgccccgcacggaaaataccgttgagctaggcggtggttttgccagcgatatcggcccaagggtaaaagccagttggcgtaaaccctgggtgaataatcgtggccacagttttacgacgagcgccaacgtttcggcccctgagcaaagtcttgattttagctaccgcattcctttgctgaaaaatccacttgagcaatattatctgcttcagggcggtttcaaacgtaccgatctgaatgacaccaaatctgacaccaccacgctgaatgtggcgcgtttctgggatatgtccagcggctggcagcgttctatcaatctgcgctggagtctggaccactttacgcagggtaacgttacggataccactatgctgctgtatccgggcgccagtgtgaatcgcacccgtcagcgcggcggcgcgatgccgtcgtggggagacagccagcgttactcggtggacgtttctgataccacctggggttccgacgtcgattttgccgtgttccaggcgcaaaacgtgtggattcgtacattaggtgagaaaaaccgcttcgttgcgcgaggaaatctcggttggatcgaaaccaataactttaatcgagtccctccatctctgcgtttcttcgccggtggcgatcgcagcgtgcggggttataaatatcaaagcatttcaccgctggatagttccggtaaattgagcggcgcatccaagttggctactggctccatcgaatatcaatataacgtcactggaaaatggtggggtgccgtatttatcgattcgggtgaagctgtgaacgatatccgtaagagcgattttaaaaccggcgcgggtgttggcgtgcgctgggaatccccggttggaccgattaaatttgaccttgcagcgccggttggcgatcaagaaacccacggagtccaattctatattggtttggggcctgaactatgaattggctaaagaaactcagtatcgcatttttactcattttgctgttgctgatcggcactgtggccggtttgctcggcaccactaccggtttgcactttctgatcaacagcgcggcgcgttgggtgccggggctggatattgccagtgtcagcggcggctggcgggatctcacgctgaaaggcattcagtaccaaatgccgggcgtgacggtgaaagccggccagttccatctttccctgcagttatcttgtcttaaacgtagcgaactgtgtgttaacgctttgacggcgcaggatattgacgtggttgtcgatacaaaattgctgccgccttctgagcctgtgccgccggatagcgaacccatgggcgagctgagcacgccgtatccgatgactctgcggctgctggcgattaaccatgtcaaagtgaccatcgacgatacggcgatttcgctggacgagttccgcactggtgctcactggcaacaacgcgcgttaaccttgatgccgaccaaaattagcgggttgttgattgccttaccgaaaaccacgccagttgccgtgccggaagcaatgaaaccggcggtagacacggcgattgcagtcaaagaagccacggaaaaagcagcggagaaagtggctgattccgcgccaacgcaagatttagctcagtcctccgagcctgaaaaaccgctaggggaaacgttaaaagccctgttcgccaagccgttgctgccagagttgcctgattttcgtttgcctgtcgatttgcagattcaggaaatcaatgctcaacagctgcgtttgaccggcgataccgaagcattaatcactagcctgatattgaaagccagcacgcaagatcaaagggtgacgctggaaacgttggatattaaatccccgcagggtggcttgaccgccagcgggcaggctacgttggcagataaatggccgttggagttggtggtaaatagtgccgttaacgttgagccgctgaaaggcgagaaaatcaaactgaacctgggtggcggcctgcgggatcaactcactgtggcgctaaatttgtccggcccggtcagcgctcagcttgaagcacaaactgaactggctaaagccggtttacctctggctttgaccttacaaagcaagcagctgcgttggccttttaccggcgacgctcagttccaggtcaataacttcaaaacgcgctttaacggacaggcctcagattatgcgttgtctattcgcgcagacgtaaaaggggcggatattcctcccgccgtcattactttggacgggaaaggcaacgttgagcagtttaggctaacgcgtttgcggttggcggcactgcaaggaaataccgatctaactggcgtagccgactggagtcacgctattagctggaactcggttctgacgctaaacggcatcaatacggcgaagcagtggccggaatggccggcgaaactggacggcaagattgtcacccgcggcagtatgcacggcggcagctggcagcttaatgttccagagctgactttagacggtaacgtaaaacagaatcgcgtcacggccagaggctctctcaccggcaatgccgccggacaatggcatattccgggtatcaatctggcgttgggtcgcaataagctggatgtgaagggcgatctgaatgacaaatgggttctcgacgccaatgtggacgcgccgcagttagatggcgctctgccaggtttggctggcgtggttaaaggcaatctgaagctgcgcggcgatcttgcagcaccacagcttttggccgatctaaccgcgacggggttgcaatggcaagcactacatattcgccggattaaggtcgatggcgatgtgcgttctgctgagcagattcaggggcaactggcggtacgggttgagcaactgaagcaggacgacttattggtcagtctgttgacgctagatgccaaagggagcgaaaagcagcatcagctacgtttaaacgttcagggagagccggtttctggccagttggcgctggacggcagtttcgatcgtcaacagcagcgctggcgtggcaatctgaacaatacccgctttgacacgccagttggagaatggcgtttaaatcgcgctattgctctggattatctcaatacggcgcagaaaatcaccatcgggccgcactgctggcagaacccgaatgccgaactttgtgtgccacgtaccattgaagctgggccaagcgggcaagctagcatcgtgcttaatcgctttgatttggcgatgattaaacccttccttgggccggataccacgctaaacggcgtattcagcggtcgagcggacgtgagctgggcagaaggtggtgccttgcctcaggccaaggtttctttggtgggtaaaggggttaacgttaaacagatggttcaggggaatcctctgccgctggcctttgataccctgaatttgaacgcggcgctgaataatggccgggctcaggccgattggctaattaagctgacaaataacggccagtttaacggtcaggtgcaggtcgcggatccgcaagggcgcagaaatctctctggtaatattgctatcagtcatatttcgctggcgatgattaacccgattctcagcgacggcgagaaagccaaagggatgctgaacgccaacctgcgtcttggtggcaatgccaaaaatccactggtcttcgggcgtttggcgcttgaagacatggatattgacggtagctggatgccatttgatattactgatgggcgtctggccgtgaattttgatggcatgacctccactctggaagggttgattcgaaccacaaacgggcagcttaatcttgatgggagcgcggattggcgcaatatcgatgcatggcgtgcccgtatcgcggcgaaaggcaataagctgcgagtcactatcccaccaatggttcgcgttgatgtatcaccggatattgtgtttgaagctaccccgcagctgttctctcttaacggttctgtggatattccgtgggcgcgtataacggtacaagaagtgccggaaagcgcggttggcgtatctccggatgaagtgatgttgaataacaaccttcagcctatcgccccaagaagcgcgggtattccgattaacagtaatctgcttattcatgttggcaatgatgttcgtctgaacgcttttggcctgaaagcgcgcctgcaaggcgatctgaaaatggttcaggatcagcgcggtttggggttaaacggccaaattaatattccgtccggtagtttccgtgcctatgggcaggatctgatcgtgcggaaaggcctgctgttgttctccgggccgccggatcaaccgctgctgaatattgaagcgattcgtaacccagattctaccgaagatggcgtcaccgctggggttcgggttactgggctggcagatgcgccgcagcttgaggtgttctccgatccggtcaaatctcagcaagaggctttgtcatacttactgcgcggccagggtctgagcagttctggcaccgatagcagcatgatgacctcaatgctcatcggcatgggggtggcgcagagcggcaagctggtggggcaaatcggtgaggcgttcggcgtaagcgatctggcgttggatactcagggcgtaggagatagttcgcaagtggtcgttagcggatatgtcaccaaagacctacaggtaaaatatggtgtcggtatatttgactcattggcgacgttaacattacgctatcgattgatgcccaggttgtatctggaggcggtgtctggtattaatcaggcattagatgtgctctatcagtttgagttttaatgatgcgaattattgtctacggtagtttacggcgcaaacaaggtaacagtcactggatgactgacgctcagcttttgggtgaatatgaccttgatgggtatgaaatgtacaatttgggccattatcccgcggtcattcccggtgaaggtcaggtgcattgcgaggtttatcggataaactcagccatcatgaccgagctggatgaactgaagagtaataccaaagattataagcgtgagctaattcaaacgccttttggcagcgcctggatttatctctatcgcctgagtgttgcaggattgccgcggattcgaagcggtgactggctcaaacgccacgaagaacacgaagaaaagtgatttgaaagtaaaaaaacaccgctcattgagcggtgtttttttatggggcagcggcaagaattacttcttggccgcgcgctcgaaagaagcaacgatttcagctttcgctgctgctgcatcttcccaaccgtcaactttaacccatttgccggtttccagatctttgtagtgttcaaagaagtgtttgatctgcgctttcagcagctctggcagatcttgcacgtctttaacgtgatcgtattctttagtcagtttgctgtgcggaacggcaaccagcttggcatcttcgcccgcttcgtcagtcattttcaacacaccaactggacggcaacgaaccactgaacccggctgtaatgggtaaggcgttggaaccagaacgtcaaccgggtcaccgtctaaagacagggtgttgttgatgtagccgtagttgcacgggtagaacatggcggtagacatgaaacggtcaacgaacagagaaccggtttctttgtcgatttcgtatttaattggatcggcgttagctgggatttcgatcacaacgtaaatatcttctggcaggtctttacctgctggtactaagttcaagctcatgtcggtttccttttatcaaaccagaaatggagtgccggctattatagccaactcttttcttaattcccgtccttttcacatctggataatggaggtattagctaaatttggctgaacaagccgcgtagaaatctcgtcattgcctaatcgtatctattttcacctgttttactcgccatagctcaagaaggtatcgggtacgccgataacttatctaaataatatgcctgctcacttttagttaacgctttgtaatcttcattcttcgcagataaccgggaaaaaaagatgttaaaaaagattaccgtaaagaccgggttgatcgcccagttgagtttgatgtcgttgattttattagttgttagcgtaattggtatcaactccattcacgaaagctctaattctttgcggatcattaatcagattcagggagaggagctgggggcgttatccaatagttttaatgcgacgttaagtgccagagccgcggctgccttggctgtcaggcaaatggaaatcggcctgattgatgaatcccagaaaacggccaacaaaattgaagccgatttggcccaatctcagcaggaaatgaagcgctttattgcggcggtcactgccagaggggaaggggaagacctggcgaataatattcaaaaaagttataaattctatctcgagcaaggcgtgtttccgatgctggaagcgatcaaagcaggtaaggcggacgattactatgaagcgctggaaaaccggatttccagcatcagcggtgctttcgatggagatgtgcagcaattccgctcttatgcgctgaatgcaggccagcagcaaattgagcaagccaatagcgcggcacacattaaagttgccattattgtcgcttcggggctgataactttattttccgcgatagttgcctggtttgctttgcaaattattattctgcgtccgttggagcagtctattcatcaattggagtttattgcggccggagatctgacccatagtattaatggcgaaggtaaaaccgaactggcgcgcttggccatggctttacaggccatgcagcaatcgctggtggcttcagtgagccatgtccgggatgttggcggtcagattggtatcggatcgcgggagttagccgcaggtaatatccatctcgcgcaaagaaccgaagaatcagccgcttcgctggaacaaactgccgccagcatggagcaactgacttctacggtgaaaatgaacgcggagaattcagatcaagcaaaccgtttggctgtgagcgtctctgagatcgctaatcaggggagttcggtggttaatcatgtgatggataaaatgcaggcgatcaccaccagttcgcgaaggatttccgatattatcagcgtgatggatagcatagcgtttcagactaatattctggcgctgaatgcggcggtggaagcggcccgcgccggagaacagggacgaggttttgccgtcgtcgccggtgaagtccgtaatctggctcagcgaagcgcccagtcagccaaagaaatcaaagggttgattgtagaatcgcaaagtcgggtacgggaaggggctgatatggctgagtccgctggtaaaaccatgaatgatattgcccgcgaggtaagccgggtaacggcattaatgaaagaaatatccgctgcgtcccatgagcaaagctctggtattgagcaggttaatctggcgattacgcaaatggatcaggtagcgcagcagaacgcagcgttggttgaacaggcagcggcggcaacgcgctcgctagaagagcaggcggatgcgcttgctgccagcatggcggtgtttaagctgcagccggatgaagaaaccgtggcagcataaaaaacagcggccgtagccgctgcttgattcgatctatatggaataataattaatctgggaactgagcgataaaacgctctgcatcttccaccatagatttggtaccgacgaagaatggcgcacgttgatgcagcttctccggcacgatatccagaatacgattcacaccatcggtggctttaccgccggcttgttcagccaggaatgccattgggttgcattcgtacagcaaacgcagtttcccttgcggatggctggcggtacttggataaatatagatgccgcctttcaacaggttacggtggaagtctgcgaccagagaaccaatatagcgagaagtataaggacgctgggttgcatcatcctgctcctgacaatacttgatgtatttcttcacgccctgagggaatttgatgtagttcccttcgttgattgaatacatgcaaccggttgctggatagcgaactttctcatgggataaacagaaaacacccagcgatgggtcgtaggtaaatccgtgaacgccgtaaccggtagtgtagaccagcatggtggatgaaccgtagaccacgtagcctgccgcaacctgagcgctgcccggctgaaggaaatctttttctgtgacgggttcgccgattggcgtaatgcgacgatagatagagaaaatagtaccgaccgagacattcacatcaatattagaagagccgtctaatgggtccatcagaaccacatatttggcgttctctgctctctcaccttcgaaaataacgatgtcatcttcttcttcagacgcgatacccgcaacttcgccacgcgctttaagagcggctttcagcttctcattggcatacaaatccaatttcatctgaacttcaccctgcacattttcagcgccgctggtaccgagaatatcgaccagacctgctttattgatgtcgcggtgaatgattttagcgcctaacttgatagctgacagtaatgcagttaattcgcctgtggcgtgagagaagtcttgctgtttctcgacgataaattcgcctaacgttttcatgacacaatccctgaatctacggttgaacatcgaattactaacaaaccacttacaatatgctcgcagtgtagcccaaagctaagattgattcataggcaattccatttcttctctcggattctgagcggtagaatagccgcaaactcgatgcaatcagacggaaacatttatgcgcattcatattcttggtatttgcggcacgtttatgggggggctggcaatgctggcgcgctcattggggcatgaggtcactggggccgacgctaacgtttatccaccgatgagtaccttgttagagaaccaagggatcagtttgatccagggatacgatccggctcagctcgatcctgcaccggatctggtgatcatcggtaatgcgatgactcgcggcaatccttgtgtcgaagcagttttagaacgcggtattccttacgtttctggcccgcagtggctccacgatcaggttctgcctgagcgctgggttattgcggtcgcaggcactcacggtaaaaccaccaccgccggtatggtgacctggattctggaagcctgtggctatgagccaggctttgtgattggcggtgtaccgggtaattttgacgtttctgcccgtttaggtaacagcccattctttgtgatcgaagccgacgaatatgactgcgccttcttcgataaacgttccaaattcgttcattacagcccacgcacgctgatcatgaacaatctggaattcgatcacgcagatatctttgacgatcttaaagcgatccagaagcagttccatcatctggtgcgtttggtgcccgggaaaggcaagatcatcctgccagataacgacaaccacctgaaacaggtgatggcgatggggtgctggagtgagcaggaatttgtgggcgaaaccggcagttggtcagcgaagaaagtcacggtcgatgccagcgcttatcaggtattcctggataatgaactggttggcgaagtcaattggtcgctggtaggtgaacacaatatgcataacgggctgatggccattgctgccgctcggcacgtcggtgtacagccagccgacgcttgccgcgctctcggtgattttatcaatgctcgtcgccgtcttgagctacgtggcgaagccaacggcgtaacggtttatgatgattttgctcatcatccaacggccattctggctactttagctgcgctgcgtggcaaggttggcgggacagcgcggattttggcggtgctggaacctcgctcaaacaccatgaaaatggggctgtgcaaaaatgagctggcgccgtcactcggccgggctgatgaagtctttctgttccagccacagcatattccgtggcaggtggtggaagtggccgaagcctgtattcaaccggcttcatggagtgctgatattgatacgctggtagaaatgatcgcgaaaaccgctcagccgggcgatcacattctggtcatgagcaacggtggtttcggcggaatccatagcaaactgctggaagcgctggagaaaaaggcgcatcagcagctattgaactgatttagataaaaaaagcccccgaaagggggccaaagggttcgctggataggacagcgagggattatctagcattgctctttcttacttttttcttgctcttgctcaatagacttatgttcatctgtttatagttaaaagattattgagcaagcttgtctgtttgggatttgccgcttaaaacaccgtgcattcgcccttatttgtaaatcttggctgttgcatgccagccattttcctgacgcatttcaatgattttatacgctgtagcgcctttgctatcggctttgtcggccagtgcctgagtaatatcagaaggcgcgccggtgatgccactcacgctgatggttcccatatcggtcaggctgttagtttgagcattattaacagactcggcggctgaagcgccaaacgcgataacggaaaataagcctagtgcagcgatggtatttttgattttcatgatctcttcctaaaaatagccaacaaccagaaagcattattatcgattctgctacttagaggctgttgttttgattgtgtttctattctgactgaatctggtaaggcgatgcgccaggtcagaatttactggtagatttttgctgtagcgtggaagttgccgtcttcgcgagcttcgataacctgataagccttggcgccttgtgcatctgctttgtcagacagtgcctgacgaatatctgaaggcgtcccattcacaccgctaacagtaatggtgccaaccgattgtaagttagccgcttggcttgcgttgattgaatcggctgcaaatacgccaaatgacagtgcagaaagaacgcttaatgctgctacggtagttttaatgttcatgttatggcctcttaatattcttttattagtttgcgtaaatgtgatttacgtcacgaaatgagtatacatctagtcacccgaaacattaatagcgggctaataatatttagcgtgactttaatgtgagttattagtttttaataaccaaacggaataaaaatcgatcaaaaaatgagtgattgaggcaaaaaagtagatatttcaaatgagtgggtgtttttgaccaaaagtgcgaaaattttagcgtgtattcgctgtttaatgaaaaagggtcattttccgtgccggttagatgagaaaatccagtgatattcactacatgcagtatgcctcttgggaaatagctcagaggctagttatatctataggatgataacgagcaaaaaagcgaagctgcatggcttggaaaggatggctgatgcaaggtaaaggaagatgactaagggaataggctgtcgcagatcgaagatggcaaagggattgaaatgcagagtatgtactgtaaaaggccaatagaaccttgattctactggccgcgatctgattggctgggattacagctcttggtcgaataaacctaaaatggcgtcatgcagctgtttaacactaaagcctttagctggcgtggtgaaaattgtgtcatctccggcaatgctacccaggatgccttcggctttccctaatgaatctagcaggcgggcgataagctgagcagcaccagggctggtgtgaatcaccacgacagaatcattataatctacgtcgagaaccagatttttcagcgggctgctggtcgttggaactcccaattctgctggcagacagtaaaccatctccattttcgcattacgggttctaacggcaccaaacttggtcagcatgcgtgatactttggattggttaatgttttcaaacccttcctcctgcaatgccaaaacaatctcgccctgagaactgaatttttcctctttcaataacgctttaaacgctttgataaggtcttcttgttttgcgggatttcgcatttttcacctgggggaatggagagttaggaagccaattatgcatttaaatgaatttttattcaacattagcatgcgtaggaagtaataaaagctcttatatcaaagcagatgacaatttagcgtaaatatatctctaactattatgcctaagctaaatgcatagcaatcaaacagtcgtgataaaaatgttattaaaatgatgttgttctgatgttatggaagggtgtaatgtaaccgccgattaacctgttgtggatgcttaaattatttttagaagaatgtgcgctatatcattaatcgataagcgaattactctaaaataagccgacttcacacccgtttttaatgcgtgatctctcaatctgactgttaatagattgtgtttaaaatcgcaataaactaaggtgcgtaaatagatgaattcacggcaaatttaaattatatataacaaggagtataggatgaaagttgcagttctcggtgccgctggtggtatcggccaggccctcgctcttctactcaagactcagcttccttcaggttcagacctttctctgtacgacatcgctccggttactccgggtgtagctgtagatctgagccacatccctacggcagtcaatattaaaggttttagcggcgaagacgctaccccagctctgcaaggcgctgatgtagttctgatttctgccggtgtagcccgtaaacctggcatggatcgttcggatctatttaatgttaacgctgggatcgttcgtaatctggttgagcaaatcgctcgtacttgcccaaaagcattgatcggtattatcactaatccagtgaacaccaccgtagctatcgcggctgaagtactgaaaaaagctggggtatacgacaagaacaaactgtttggtatcaccactctggataccattcgttcaaacaccttcgttgctgaattgaaaggcaagcagcctcaggatatcgaagtgccggttattggtggtcactctggcgtgactattctgccattgctgtcacagattcctagcgtgagcttcaccgagcaggaagttgccgacctgaccaaacgtatccagaatgcgggtactgaagtcgttgaagcaaaagccggtggcgggtctgcaacgctgtctatgggccaggctgctgcgcgtttcggtctgtctctggttcgcgctctgcaaggtgaaagcggcattgttgaatgtgcatatgtggaaggcgatggcaaatatgctcgcttcttcgcgcagccaattctgcttggaaaacaaggtgttgctgaacgtaaagacattggcaaacttagtgcctttgagcaaaatgcattagaaagcatgctagacgtgctgcacaaagatatcgaactaggcgtagatttcgtcaacaaataacaattgttgattgaaaacagcggggggttattttcccttgactgtttcgtctaagaagccgctggtggcaagcaccggcggcttttttatgtcagtaagttatgactgtgctgaacgaatacgcgttttcctatccagtaaggcccctgttctagcgtcaaaatagcgggaaggccagatttccgagggatgaatctccagacattccgcaattagccactcacctttcggccagggacgagtcagggcattggctagcgttgatgagctaagaccggcatttcgagacaacgccgccagggttgttcctttcttccgcagtgccgcaataacgtcggcagggtgccaatcagatttccttaaaatcatctttaatccttttttttactaagctgctggcatgttagtggtataactaaccgtgtatcgttaatcatattacgaacgaaaagtaatcatttagaaacaggataacatcaaatttccaaatgattttcaaatattttctaaaaattccttttttgcgtgttaccgcatagtagagaagaaaggctatgaaaaaagagtggtttgctgccaaggaactgacaggtatcgcggggttgccctcgtctccacaaggaatcaacctcatggcaaaacgtgagggttggaaacaacggcgtcgccggggagttcagggtaaagcggttgaatatcatatagatagtttgccggtaagcgtgcttagtctgctacgactcaaagaggacccggtagattatgtcgtcacgcgacaggaaccgatagcggtatgggtagaggcctactatcagttaaccgaagcggagcgcgacaaaatcatcagttttattttgcgtgaagggattggttcgttaatgacgcgtttagccattacctgattaatgctgagcggggcatctattttattgcgctgttcggatgcccgaattgttgagtaaatccgagagtagatcatccatgaagaaacagtggttttcagccagggaattaacaggcatcgcaggattaccctcctcgccacaaggaatcaaccagatggccagacgcgaaggctgggaactacgccgccgacgtggagttcaaggtaaagctattgaatatcatgttgatagcttgcctgggcaagtgctggatatgataaggatgagggaggaacctgcggaatatatcgttgccagacaggaccctttgcaggtttggattgaagcttattaccagttgacggaggaagaacgcgatcaaattattgcgtttattttccgtgagggcgtcgcaacattaatggcgcgtttggttaatcgttagcgataaatcaggaaaacaacccagtcgttatttaacttccgggttgtttctttaagtttctcaaaaatctcgctgtacggctatatgcgctaaaccttccagcgctaatcgatgcggagtttctggcaatatctgcaatgcggcaattgccttgtcagcctcttcttccgcacgctgacgcgtataatccagagagccacattggcgcatggtttccagaacgggttccagcaaatggcgaccatttccttcttcaatcgctttgcggatcagggcagactgctcgggattcccgttattcatggcatgcagcagcggcaaagtcggtttaccttcatttaggtcgtcaccggtatttttaccgagagtggagccatcggagctgtaatctaacaaatcgtcgataagctggaatgcagtgccaagatagcggccataatcctgcagggcaatttcctgctctggggttgcgtcggcaagaatggcggaagattgagaggctgcttcaaacaggcgggccgttttactgtaaatcacccgcatatagctttcttcggtaatatctgggttattacaattcattaattgcagaacttcaccctcagcaatcacgttggtggcctctgacatcaattgcagcacgcgtagagaacccagactggtcatcatctggaaagagcgggtgtaaatgaaatcaccaaccagcacgctggcggcgttaccaaaggcggcattagccgtcgctttaccgcgacgcatatcggattcatcaacaacgtcatcgtgtaataatgttgcagtatgaataaattcaattaatgcggcgatagtgacatgtttatcgccctgataacccagcgctcgggcaaccagcaccgcaatcatggggcgaatacgtttcccgccaccgctgataatgtagtaacccaattgattgatgagcgttacatcggagttcaactggtcgagaattgttgcgttcacggccgccatatcctgcgcggttaactcgataatcttttctaggttcattgttttattcagctgtttttctctttaactacgatgacatcgccgctaacattattacatgacgttccctgagaccatgattgtacttgaaaaacgcgttaaataaatgacatgtaagaaactgcgctttttttcttcgtttgcagctattctgcgcttgtcatccgatccgtttttgcgtagaattcgcgccctaatatgaatatttatagtgcgctctggactacttaagtagggtgcacggaaagcggagttttatatgtacgcggttttccaaagtggtggtaaacaacaccgagtaagcgaaggtcaaaccgttcgcttggaaaagctggacatcgcaactggtgaaacaattgagtttgaccaagttctgatgatcgctaacggtgaagaaatcaatatcggcgctcctttagtcaatggcggtctggtcaaagctgaagtagttgctcacggtcgtggcgacaaaattaagattgttaaattccgtcgtcgtaagcactaccgtaagcagcaaggtcaccgtcagtggttcactgatgttaaaatcaccggtatcagcgcttaagttttaggagagcggacaaatggcacataaaaaggctggtggctcgactcgtaacggtcgtgactccgaaagtaaacgtctaggcgttaagcgttttggcggcgaagcagtattggcaggcagcatcatcgttcgtcaacgtggtactaaattccacgctggcatcaacgtaggttgcggtaaagaccacactctgtttgctttggctgacggtaaagtcaagttcgaagttaaaggcccgaaaaaccgtaaatttatcagcatcgaagctgaataagtttttcgcgtcctgctaatagatgtaagccctgcaattttgttgcggggctttttacatttctgggttgaccttacctgagtgaagtcatgaatacgaaacagcaggccggtttaggcattcttcttgcgttaacgactgccgtattctggggtattctgccgatagcaatgaagcaagtacttgaagtgatggacccttttaccatcgtctggtaccgctttacgcttgcgtctttgggcctgggattgattttggcctccagacggcaattgccttctctcacgttatttcgtcaacctcggtggttgttgttattggttattgccacctgcggtttgctggggaactttctctttttcagctcatcgctacagtatcttagcccgacggcgtctcaggttatcggacagttgtcaccggttgggatgatgatcgccagtgtgctgattttaaaagagcgcatgcgaattacgcaggttatcggcgcagcgatgctgatttgcggtttgatgctcttttttaacaccagcctgctggaaatctttaccagactgacggattacaccctcggcgtggcattaggcgtgtgcgccgctatggtttgggtgagctacggtgtcgctcagaaggtgctattaagacgcatggcatcgcaacagatcctcgtcttgttgtacactttatgtgcactggttctgtttccgctggccaaacccggcgttatttttcagttaagtggatggcaactggcgtgtctgctgttctgcggggttaacaccctggttggatacggagctttggctgaggccatggcgcgttggcaggcggcgcaggtaagcgctttagtgacgctgactccgttgtttacactgattttttcaaatttattagcgctggcgtggccagatatgtttgccgcacctcccctcaatgccgtgggctacgtaggggcgtttgtggtggtggcaggtgcaatgttttccgcaattggtcatcgatggtggccacggcggacagaaacaaccctggttgctccgttgaagcagcccggtgaatgatttacggagagagacatgaagtttgtagatgaagcggcgattctggttgtagccggtgatggtggtaacggttgtgtaagcttccgtcgtgaaaaatatattcctaacggcggcccggacggcggcgatggcggcgacggcggtgatatctacctgctggctgatgaaaacctgaataccctgatcgattaccgctttgtgaaatctttccgcgctgaacgtggacagaatggccagagccgtgattgtaccggtaaacgtggtaaagatattaccatcaaagtgccggtcggtacgcgtgtactggatcaggataccggtgaagttatcggtgatatgactcgtcacgggcagcgtctgatggttgccaaaggcgggttccacggtttgggtaactcccgtttcaaatcttcggttaaccgcgcaccgcgtcagaaaaccatgggtactgaaggggaaactcgcgaactgatgcttgagctattgctgctggctgatgtcggtatgctgggtctgccaaacgcaggtaaatctacctttatccgtgcggtatctgcggcaaaaccgaaagttgccgactatccatttaccaccttgatcccaagtctgggcgtggtgcgtatggatcatgagcaaagcttcgtcgttgccgacatccctggtttgattgaaggggcttcggaaggcgctggtttaggtattcgcttcctgaaacatttggaacgttgccgcgtactgttgcatctgatcgacatcgcacctattgatgaatccaatcctattgagaatgccaaaatcattatcaatgaattgcagcaatacagtgaaaatctggccgagaagccacgctggttggtatttaacaaggttgacctgttagaccaggctgaagcggaagaacgcgctaaggcgattgcagacgctctgggatgggaggataagtattatatgatctcggccgccaaccgcgaaggcgttaacgcgctgtgctgggacgttatgaacttcctgaatacccaacctaaagctatggcaattgctgagactgcccctgagaaagtcgagttcatgtgggatgattatcaccgtgaacagctggcagaagtggaagatgaagcgaaagacgaatgggatgacgattggaatgaagaagacgacgatggcgttgagttcatttacgagcgttaatctcagacatcagttttgagctaaaagaggctgcctgcgggcagcctttcgttttttgggcttattgctgatttggcaaccagcactgggcgttcaatccctgtcgatcgctgcggttctccagcgacagttttccctgatgcaactgtgcgattctcaatacgatattcagccccaatccgcttccaccatagcgttgatccatacggcgaaaagcctgcgtcagctcgccaatctggttctccttaatccctgggccttcgtccaaaacctgcaacagtacaccgctatcctgcgatgtcagtttaacgataatcaggctgtctgaggggctatagcggtgagcgttctccaccagattacgcagcattaaacgcagcagggcggcttcaccttgaatacaggaacgttctggtaaaatccattggagacgctgtttacgctgcgccgccatttcggccagttcttcccgcaacggttgcaccacatcctgaatccagtcaaaagtctgatattgtccgctggcaaaattctgccctgcgcgtgacagcatcaacagttgttcgatggtatgcatcaataaatcgaggcgattaattagcactttgctttccgctatgccatttttttccatcaattccagatgaaggcgaatgcccgccagcggtgtgcgtagttcgtgggcggcatcggcagtgaaacgacgttcttgctgaatggtattggaaaggcgggaaaacagctgatttagcgtgccggtaacggcgacgatttcctgcatatcacttttgataaccagcgggctaaggttgtccgcggagcgttcagaaagcttgctctgaagttgatccaacgggcgtatgatccaactgatagcccaaaaagaggcgaggagagtgatgatcatcataatcagagaaggggccagcagtgaagcgatggcctccgcaatttctgtgtcgactttttcatttctgactttggcggtgagagtttcatctactaaaaactgaatttgttcctggctctcatgccacagccacagcgcgctaattaactgagtgactaatagaatcagcgctagcatcagaatcagacgacgacgcatgctgatcatgataagacttccagacgataaccaatgccccgaaccgttcggattcgatctttacccaattttcttcgtagattatgaacgtgcacttcgagagtattcgagccaagatcgtcctgccaagtatagagatcttgctgtaacagctcccgattgacggtgtgcccggcgcgcataatcaggcgggaaagaatggcaaactccttcggcgtgatttccagcggctgttcctgtagataaacctgttgagttgccagattgaggctcaaattcccttgttgaagcaaattatcactttgcccctgatagcggcgaatcagagcacgcacgcgagccaataattctgccagcgcgaaaggtttaatcaaataatcatcagcgccagcatccagcccatcgacgcggtcttccaacgcatcgcgagctgttaatatcagcactggcaggctaatactctggcggcgccattggcggagcaacacggcaccatcctgatctggcaatcccagatcgagaataaccatgctgtactgactggtgataatcagaccgttggcttcagccgcggtactggcgcaatcgcaggcgtaaccctcactggtgagggccatggcaatgcctttttgtaacaactcatcatcttcgacaatcagtagtttcatggttttcagttattctgataaatatctttgtacaggcggctttcaaatcgaaccagcggcgcccggcggtttttttgatcttccggtggaacggcatagccagacaggaactggacaaacgccatgcgctgaccgctggcggtagtaataaagcctgccagattgtagaccccttgcagcgccccggttttggctgacactttgccatcaaccccggcttcgtgcagaccaccgcgatagcgcaatgtgccgtcataacccgataatggcagcatggagatgaagttaagttcttgatcgtgctgggcaatatattgcaatgcctgcatcatggtcgcaggagcaataagattatggcgcgataagcccgaaccatccaccacgatgctatttccgaggtcaactccagctttctgacgtaaaacctgacgtactgcgtcagcgccggctcgccaggtgcccggtacgccgaaacgctgatggccaatagttcggaaaactgtatcggcgatcatattgtcggattttttcagcatgatttttagcaagtcatgcaacggagcggattgtgcctgcgccaacacgctgccagccgcgctcggcgtagtttggcgtcttagattaccgtcaatctgaatatcggctttttttagctcgtctttcaaaatagcaccggcatagctagcgccgttttgcaccgcaaaggctaagggcaggggttcgctgcgttgagtcaggcagccggtaagggtaaagcggttgagttcgccgggaaccacatctagttcgcaatattgggcatccggcgagccttttgccagagtgcgaacttcgctaaacatttgtacgggatagtaagaagcgacgcgaataaaggccatatcgccgggattcggtgcgctgtacagcgataccgagaaacagttgcgatcgacaattgcggccgctggcggtgcgctgaagcactgggtcatatcgttccacggccagccgggcgctttatcatggctggcaaaaaccgaggtatcgataatcaaatccccggcaatttggcgtagacccgattttttcaacgttgttaccatatttcgcagttgctggcgggttaaggtcggatcgccatcgaaacgggcaatcagattaccgcgcagaacgccgtcagttatcggcgcatgactttccagcgtggtaacgaaacgaaaatcaggccctagctgcaacagggcggctagcgctgtcagtactttctgagtactggccgggagtgccatttgctgggcgtgatagtctatcaccggagttgtcgccccgattttttgcaccactaaagcaagattcgccccatcgggcagatactgcgtgtaattttctacctgcgccgcattggcattgaatacgctgatgttgatcgcaaaaacgcaggccaatttactgactattcgtgaaaaatgcataatttcggtataactgctgggtaacgtacagccatactacggtgcaacgagggcgaaagtaaacgatgaccctaaaggaactctacgttaaaatgtttatcaaaatgcaaaatcgatcctaacttggagttttagctccgggagggttttttttgttaatcgcctggaggcgggtaggattttaggctagccgtattttcattcgaaaacgtcaggatgacgattatttgaacaggatagatttagaggtatttaacagatgaaacagattccgatgacggtacgtggtgcagatcaactgcgcgaagagctcgaatatttgaagggcgtgcgtcgcccaaagattatcgctgatattgcggatgctcgcgaacacggcgatttaaaagaaaatgctgaataccatgcggctcgtgaacaacaggggttctgcgaaggccgtattcaggaaattgaagcgaagttatctaacgctcaggtgattgatatcaccaaaatgccgaataatgggcgggttattttcgcttctacggttacagtgttaaatctggacacggaagaagagcagacctaccgtattgttggtgatgatgaagcagattttaaacaaaatcttatttcagtaaattcaccgattgcccgcggcctcatcggtaaagaagttgatgatgtggtggttattcgtactccgggcggtgatgtagaattcgaaattcttaaagtcgaatatctgtaatacggctgatttgagcaataagtaagcagatatttgtaaagaaaagaaaaaaggccgcaagcggccttttatcagaactaagtgcatggcaccttttctttaaaacgaacgtcattaacgcggtaaaataatcttgcgctctttcgccgggcggtagagtactaaaatattaccgataatttgcacgttaactgcaccggtttcacgcacgatagcatcagcgatcaaggttttggtttcacgctcttcagcagtgatttttaccttgataagttcatgatgttccagtgtttgttcgatctcagccagcaccccttcggtcaagccgttattgcccagcatgactactggttttaacggatgggccaggcttttcaggtgctgtttttgtttgttattcagattcatcgtcttttttgcttaagttgggattgaaaacggttcattctaccgccatctcatgtgtatcaccaaatcggtcttttaccggttagggagtctacgcgagctaagcaatagatgcgcgggctcttaattaggatagttggaaaaagagatggccaataaaaagcgttcagctagctccagtcgctggttacaagaacactttagcgataaatatgtgattcaggcacagaaaaaagggttacgttcgcgcgcctggtttaaacttgatgaaatacaacagagcgataaactctttaaacccggtatgacagttgtggatttaggtgcagctccgggcggctggtctcagtatgtagttactcagatcggtggtaaaggtcgaatcatcgcttgcgatcttttaccaatggatcctatcgttggagtcgatttccttcaaggcgacttccgtgatgaaatggtgctgaaagcactgcttgagcgggtaggtgagaaaaaagttcaggtggttatgtctgacatggccccgaatatgagcggtactccggcagtcgatatccctaaatcgatgtatctggttgaattagcgctggatatgtgtcgtgatgtattggcaccaggcggaagtttcctggtgaaagtgttccagggagatggctttgatgaatacctacgggaaattcgctccctgtttacgaaagttaagattcgtaagccagacgcttctcgtgcgcgatcgcgagaagtgtacattgtagcgacagggcggaaactgtagtaccctaacgctgtttgttaacacagttgtaatatgaggttaatcccttgagtgacatggcgaaaaacctaattctctggttagttattgcagtcgtactgatgtctgtattccagagctttggtcccagcgaatcgaatggtcgtagagtggattactctactttcatctctgacgtatcccaagatcaggttcgtgaagcacgtatcaacgggcgtgaaattaatgttagcaagaaagataacagcaaatacacgacctttattccggttaatgacccgaaactgcttgataacctgttgactaaaaatgtgaaagttgttggtgagccaccggaagaaccgagcttgctggcttctatctttatctcctggttcccaatgttgttgttaattggggtctggatcttctttatgcgtcaaatgcagggcggcggcggcaaaggggcaatgtcctttggcaagagcaaggcgcgcatgttgactgaagatcagattaaaacctcttttgccgacgttgcaggctgtgacgaagcgaaagaagaagttagcgaactggttgaatacctgcgtgagccgagccgtttccagaagctgggcggtaaaattccgaaaggcgtattgatggtgggtcctccagggaccggtaaaaccttgctggcgaaagccattgcaggggaagctaaagtgccattctttactatttccggttctgacttcgtcgaaatgttcgttggtgtgggtgcatcccgcgttcgcgatatgttcgagcaagctaagaaagctgctccatgtatcatctttatcgatgaaattgatgcagtaggtcgccaacgtggcgcaggtttgggcggtggtcacgatgaacgtgagcaaaccctgaaccagatgctggttgagatggatggcttcgaaggtaatgaaggcatcatcgtgattgcggcaactaaccgtccagatgttctggatccagcattgctgcgtccgggtcgtttcgaccgtcaggttgtagttggtctgccagacgtgcgtggtcgtgaacagattctgaaagtccatatgcgtcgcgtaccgctggatatcgatatcgatgcgtcagtgattgcccgtggtactccaggcttctccggtgctgatttggctaacctggtcaacgaagctgcgttatttgccgctcgcggtaacaaacgcgttgtttcaatggtcgagtttgagaaagctaaagacaaaatcatgatgggtgcggaacgtcgctccatggtgatgaccgaagcgcagaaggaatctacggcatatcacgaagctggccatgcgattatcggtcgcttagtgccggagcacgatccggtgcataaagtgacaattattcctcgtggccgtgcgttgggtgtgactttcttcctgccggagggcgatgcaatcagcgctagccgtcagaaactggaaagccagatttctacgttgtacggcggtcgtcttgctgaagaaatcatttatggcccggaaaaagtgtctaccggtgcttcaaatgacattaaagtagctacctcaattgcacgtaacatggttacgcaatggggcttctcagaaaaactgggtccgctgctttatgctgaagaagaaggcgaagtgttcctcggtcgctcagtggcaaaagctaagcatatgtccgatgaaaccgcgcgtatcatcgatcaggaagtgaaattgctggttgagcgtaactatcagcgtgcacgtaagttgctgatggaaaacatggatgttcttcattccatgaaagacgcgctgatgaaatatgaaactattgatgcgccgcaaattgatgatttgatgaatcgtaaagaagttcgcccgccggctggctgggacgacgctacgaagaataaatcatctgatagtgacaatacgcctcaggcaccaacgcctgttgacgaaccgcgtaccccaactcctggcaacaccatgtcagaacagttaggtgataagtaagcggattgttggcatctaaatgcgtagtgattaatataaccccgggcttgctcggggtttttctttttctggccgggataaattgaagtgcttaaccatttttaaggtaaataacgatgtatttgactgccagggatctgactcttgatctctcacaccctcaggttatggggattttgaacgtcacccccgattcgttttccgatggcggacgccacaacgatctcgataatgcccttcatcacgcgcaggcaatgattgccgcaggtgcaactctgattgatgtgggcggcgagtctacccggcctggagccgctgaaattagcgagcaggaagaattggatcgagtgattccggtcgttgaagcgttggcgaaacgttttgagatctttatttcggttgatacttcaaaagcggcagtgataaccgaatcagccaaagtcggcgcgcatctgatcaatgacgttcgttctttgcaagagccgggcgctctggatgccgcggccgcgacgggcctgcctgtctgcctgatgcatatgcaagggcaaccgcagagcatgcagcaatcccctcactacgatgatttactggcggatgtgaaccagttttttgaacatcacattgaacgttgtgttgcggcaggtatcgcaaaaagtaaattgttactcgatccgggattcggttttggtaaaaatttagcgcataattaccagttattggctcggttggcagaacttcaccattttgagcttccgcttttggtcggaatgtcgcgaaaatctatggtgggtcagttacttaatgtaccacctcaacagcgagttattggcagcgttgcctgtgcagtcattgcggcaatgcagggcgcgcagatcgtcagagtgcatgatgttaaagaaaccgtcgaggcgatgcgtatcgtcgaggcaacactttcagcgaaggaatagagagaaattatgagtgaccgtaaatactttggtacagatggcattcgcggaaaagtaggtgacaacccgattacgcctgagtttgtattgaagctcggttgggccgcagggaaggttctggctcgtcatggctcgcgcaagatcatcattggtaaagatacgcgtatttccggttacatgctggaatcagcgttggaggccggtctggctgccgctggtttatctgcgtcattcactggcccaatgccaactcctgctgtggcttacctgactcgcgctttccgagcggaagcgggcatcgttatttccgcctctcataatcctttctatgacaacggcattaaattcttcgatattgatggtgcaaaactgcctgacgaagtagaagaagccattgaagcggagatggaaaagccactgacttgcgttgagtcatcagaattgggtaaagccagccgtattgttgatgcagccggccgttatatcgaattttgtaaaggtaccttcccgaacgaattaaatctgaacggtttgaaaatcgttgtggactgtgccaacggtgcaacctatcacattgcgccaagcgtattacgtgaactgggcgctaccgtgattgccataggctgtgagcctgacggtatgaacatcaatgaagaatgtggtgctaccgatgttcgtatgctgcaagagcgcgtattggctgaaaaagcacacgttggtctggcctttgacggcgacggcgaccgcctaatgatggttgaccatttgggcaataaagtggatggcgaccagattctttatattattgcgcgtgaaggcctgcgtcagggtcagctgaaaggtggcgctgttggtacgctgatgagcaatatgggtctggagctagcgctgaagcaactcggcattcctttcgctcgcgcaaaagtgggcgaccgctacgtgttggaaaaaatgcaggaaaacggctggcgtatcggggctgaaaactccggccatgtgattctattggataaaaccaccaccggtgacggtatcgtagcaggtttgcaagtgctaactgcgatggtgcgtaacgacatgagcctgcatgatctgtgcagcggcatgaagttattgcctcagatactggttaacgttcgtttctccggtaatcacaatccgctagagtccgaagccgttgttgccgtgactcagcaggtcgaggctgaactggcggggcgtggccgcgtgctgttacgtaaatctggcactgaaccattgatacgcgtaatggttgaaggcgatgaagaggaagagctaattaagtctctggctcatcgtattgccgatgcggtaaaagcagcaggttaatggctttattttaggggggaggacgccgctcttccccgtagaattgtccgcaagttgagtaacctggctgttttttctgcaaatgagcccggttaatgaaattgcccttgcgtgtattaaccgctttggttagtattcacacccgcttaagtgggtgaatgaattcccgctgttatgggtgaaaagcatttggcatgcggtgaacccgcaaggatacaggtacaactatgtacgaagctcttctggtaattttcttgctgatttcgatcgggcttgtggctctgatcatgttgcagcaaggtaaaggcgcggatatgggagcctcattcggagcaggtgcttctgccactctgttcggttcgaatggttccggtaacttcatgacccgtatgacggctgtcttggcgactttatttttcgtcatcagtctgattttgggcaatatgagcaccaaccagggccgtaaaggcagcgagtgggaaaacctgggtcagccagttaaagctgagcagactacagcgccggtagcaccagctaagccgagcagcgatatcccgcagtaagaaatagtaagttgttgtaacgtcgtaagatagtacagaaagaaagttgaagaatggttgtggcgcttggacagtaaagcagaccattaatatcagtgccgtggtggtggaattggtagacacgctaccttgaggtggtagtgcccgattgggcttacgggttcaagtcccgtcctcggtaccaaacagatagataacttgcttttttatcgttatcgacgtagtatttgccacgttttcggacgcggggtggagcagcctggtagctcgtcgggctcataacccgaaggtcgtcggttcaaatccggcccccgcaaccactttcctaaagtgttttttttcaaatagtagtattcgcagtcctcaatactttcgatttcaatttgaaaaaaatacttgtcagaaagttgtaccgaagccgcttagcggcaaacagggtccagttgcataaagccccgaatttcggggttttttgttatttgacagcagaatcactgggctattaagccctttttttatgtcttgggggtgggcttgtccacattagaacaaaagttaacagagattatttcagcaccggtcgaagcgttaggctacgaattagtcggcatcgagttcatccgggggcgccaatcgacgctacgaatctatattgatagtgacgatggtatcactgttgatgcttgtgctgatgtcagccaccaggtcagcgctgtattggacgtagaagatccaatcacagtcgcttacaacttggaagtttcctctccgggccttgatcgccctatgttcaccgccgaacactatagtcgttaccttggtgaaacagtcatcctggttttgcgtatggcaatgcaaaaccgccggaaatggcagggtattattaaagctgttgatggtgaaatgatcacggttactgtggatggaaaagatgaagtgttcgcgctgagcaacatccagaaagcgaacctggtaccccacttttaaagtttggatgaggcaactaggatgaacaaagagattctggctgttgtagaagcagtttccaatgagaaatcccttccgcgcgagaagatttttgaagcgttggaaaccgctctagcgacagcgaccaagaaaaaatacgaacaagaaattgaagtccgtgtcagcatcgatcgtaaaaccggcgatttcgacaccttccgtcgttgggtcgctgttgatgaagtgacgatgccaacgcgtgaaatcacgctggaagccgctcaatatgaagacccaagcattcagttgggcgattatgtcgaagatcagattgaatccgtaactttcgaccgcattactacgcaaaccgcgaagcaggttatcgtacaaaaagtacgtgaagctgagcgtgcgatggtggtcgagcaattccgtcagtatttaggcgagattgtcacgggtacagtgaaaaaagttaaccgcgatagtatcgcgctggacttgggtaacaacgctgaagcggtgattggccgtgaagatatgttgccacgtgaaaacttccgtccgggcgaccgcatccgtggtgttctgtacgacgtgcgtcctgaagctcgcggcgcgcagctgtttgtcagccgctcccgttcagaaatgctgattgaattgttccgtattgaagtaccagaaattggtgaagagttgatcgaaattaaagccgcagcccgtgatccgggttctcgtgctaagattgcggtcaaaaccaacgataagcgtatcgatcctgtgggtgcctgtgtaggtatgcgcggtgcgcgagttcaggccgtttccagcgagcttggcggcgagcgtatcgatatcgtgttgtgggatgataatccggctcagtttgttatcaatgccatggctccggctgatgttgcgtcaatcgttgttgatgaagaccgacacacgatggatgtcgctgttgaagccagcaatctggctcaggcgattggccgtaacggtcaaaacgtccgtttggcttcacagcttagcggctgggagctgaacgtgatgacagcagatgatcttcaggcgaaacatcaggctgaagctcatgcggcgatcgataccttcaccaaacatcttgatattgatgaagatttcgccactgtgttggttgaagaaggtttctcttctctggaagagttggcttatgtgccaatcaacgaactgttggaaatagatggccttgatgaagatatggtagaagcgctgcgtgagcgcgctaaagctgcattgaccacgctggccctggcacaagaagaaagtcttggcgatcaaaaacccgcagatgacctactgaatttggaaggtctggaacgtagcatggcatttaaattggctgcgcgcggtgtgtgtacgctggaagatcttgccgagcagggtatcgacgatctggcagatattgaagggttgagcgatgagcaagccggcgagctgattatggccgcacgtaatatctgttggtttggcgataatgcgtaataaactgtagcaggaaggaacagcatgacagatgtaaccgttaaatcgctggcagcagagattcagaccccggttgatcgcctggtacagcagtttgctgatgcagggatcaagaagtctgaagtagactccgttacccagcaagaaaaagaaacattgctggcgcacctgaaccgtgaacacggcagcgcgccaaataaactcacgttgcaacgcaaaacgcgtagcaccttgaatattccgagcaccggcggaaaaagtaaatcggtgcaaatcgaggtccgcaagaaacgcacttatgtaaatacgccggaagctgaacaagcgaaagcggaagagcaggcacagcgtgaagcggaagagcaggcacaacgtgaagcagcagcggcagcgcagaaaatcgctgaagaaaatgctaaacgtgcggccgaagaacaagccaaacgtgaggccgctgaaaaagctaaacgccaagcagcggaaaaagaaaaagtgacgaatcaacaaaccgacgaaaaaaccaagccagctcagaccgataaagcacgccgtgaagctgaagctgccgagctgaaacgctctgtagaagaagaaacacgccgtaaggtcgaagaagacgcgaaacgcgttgctgaagaggcccgtaaaatggcggctgaaaacgaaggtaaatggccagaacctgtggctgagcagaccgagtctgctgactaccatgtaacgacctctcaacatgctcgcgccgcagaagatgaaaacgacgcgaaagttgaaggcgatcgccgtagccgcactcgtggtggcaaagcgactaaacagaaaaaaggcaataaactttccgagtctaaagccgatcgcgaagaagcgcgtgccgttggccgtaagggtaaacgtaagccaagcactttgcagcagagcttcaacaagccagtggttgcggtaaaccgtgacgtagtgattggcgaaactgttaccgttgccgaactggctaacaaaatggctgttaaaggttctcaggtcatcaaagcgatgatgaaactgggtgcaatggcaaccatcaaccaggttatcgatcaggaaacagctcagctggttgctgaagagatgggccacaaagttatcctgcgtcgtgaaaacgagctggaagaagcgctgatgagcgaccgtgatacaggtactggtattgcagctgagtcacgcgctccagttgtcaccatcatgggccacgttgaccacggtaaaacctctctgctggactacatccgctccactaaagtggcgtcgggcgaagcaggcggcattactcagcacatcggtgcttatcacgttgaaactgacaacggcatgatcaccttcctggataccccaggacacgcagcgtttacttcaatgcgtgctcgtggtgctcaggcgacagatatcgttgttctggttgttgcggcagacgatggcgtgatgccacagactatcgaagctatccagcatgcgaaagcggcgaacgtgccggttgtcgttgcagtgaacaaaatggataagccagaagccgatccagaccgcgttaaaaccgaactgtctcagtacggcatccagccggaagagtggggcggcgagtctcagttcatcaacgtgtctgctaaagcgggtacaggtattgacgaactgttgaacgcaatcctgctgcaagctgaagtgctggaactgaaagcggttcgtagcggcatggcaagcggtgtggttatcgaatccttcctggataaaggccgtggcccagttgctaccgtgctggttcaagaaggaacgctgaacaagggcgatatcgtactgtgtggcttcgagtatggccgtgtgcgtgcgatgcgtgacgaattaggtcgcgacatcacctccgctggtccgtctattccggttgaaattctgggtctgtccagcgttcctgctgccggtgacgaagttaccgttgttcgtgatgagaaaaaagcgcgtgaagttgcactgtatcgtcagggtaaattccgcgaagttaaactggctcgtcagcagaaatctaaactggaaaacatgtttgcgaacatgaccgaaggcgaagtttctgaactgaacatcgtaatcaagtctgacgtacagggttcttgtgaagctatctgtgattcactggaaaaactgtctaccgacgaagtgaaagtgcgcattgtgggttcaggcgttggtggtatcaccgaaactgatgcaactctggccgctgcttctggcgcaatcattcttggctttaacgtccgtgctgatgcttcagcccgtcgcgtagttgagactgaaggcctggatctgcgttactactccgttatctatagcctgattgacgaagtcaagcaggcaatgagcggtatgttggcaccagagtacaaacagcaaatcattggtctggctgaagttcgtgatgtatttaaatcaccgaaattcggcgccattgctggttgtatggttaccgaaggtgtgattaagcgtaacaacccaatccgcgttctgcgtgacaacgtggttatctacgaaggcgagctggaatctctgcgccgcttcaaagatgacgtaaacgaagtccgtaacggtatggaatgtggtatcggcgttaagaactacaacgacgtgcgtactggcgatatgatcgaagtattcgaaatcattgaaatcaaacgtaccatcgcttaacgacctctgatctgcttatatccatttggggggccttggcccccctacttgtctggagaatcctaatggcaaaagaatttagccgctctcagcgcgtttctcaggaaatgcaaaaagagatcgcaatcattctacagcgtgaaatcaaagatcctcgtgtcggtatggcgacggtgtcgggtatcgaactttctcgcgatctggcctacgccaaggtttttgtcactttcctgaatgtattaaccgacaatgccgatcctgatacggtcaaaaacggtatcaaggcactgcaagacgcttccggttatatccgtactttgctgggtaaagccatgcgtttgcgcattgtgcccgagctgacatttgcctatgacaactccctgattgaagggatgcgtatgtctaacctggtcacaaacgtcatcaaaaatgacgttgagcgtcagacctctacaggcactgacgaggagaagtaatgggtcgaccacgtcgtcgtggccgtgacattaacggtgttctgttattggacaaaccgttaggcctctcatcaaatgacgttttgcagaaagtgaagcgtcttttcagtgctaaccgtgcaggtcataccggtgcattggacccattagctaccggtatgctgcctatctgtctgggcgaagcgaccaagttttctcaattcctgctggattctgataaacgctaccgcgtgattgcccgtctgggccaacgtaccgatacctctgatgcagagggtgcgttgattagcgagcgtgacgtcaatttcactcaggaacagctggacgccgcgttggatagtttccgcggtgacacccagcaagtgccttccatgtattctgcgctgaaacatcagggcaaaccgctgtacgagtatgctcgtcagggaatcgaagtggagcgagaagcccgtgatatcacggtctatgagctgcaattcattcgttgggaaggttatgagctggagctggaaattcattgctcaaaaggtacctacattcgcaccatcattgatgatttgggcgaaatgttaggctgcggtgcccatgtcagctatctgcgtcgtttgcaggttgcaacttatccgagcgatcggatggtgacactggagcaactaagcgccatggttgaaacggctcaggccgaagagcgttcacctaacccggaactggataaactgttgctcccaatggatagcgcagtgttgaatttcccggaagtgaatttgctgccaatcgttgcagcttatgtgaaacagggtcaaccggttcaggtggcgggtgcgccaactgaaggcatggtccgcatgaccgaaggcgaagagcgcaatttcatcggcatcggtattattgctgatgatggcagagtcgcaccgaaacgtttggttgtggaacacgtagaataggcgcaatcggcctatcttgcgatcccacacatcaaagagtagaatagtccggcttacatattgggttgctgaattagagatcggcgcctgtctaatttaatctattatttggagttgtattatgtctctaagtgttgaagcgaaagctaaaattgttgctgacttcggtcgtggtgctaacgacaccggttctagcgaagttcaggttgctctgttgactgcacaaattaaccatttgcaaagtcacttctccgagcacaaaaaagatcaccacagccgtcgtggtctgctgcgtatggtatccacgcgtcgtaagctgctggactacctgaagcgtgaagatgtagcgcgttatgcttccctgatcgagcgtctgggtctgcgtcgctaagtctgcgagtttcgagtagaaaggggcctaatttggcccctttcttctaagaaccgatgacagaaaacgttaacgtattgttattgtttctaaaataggatcttccgttacagcatttcgcgcggctaatgagagactttagctcaatggtgagttaagggttgtcattagtcgcgaggatgtagtgtgaagatcggtaagtaacaggtggatcaggtcgtcaatacgatcgagcgccgatcaagctaaaggatattattttgctgactccgattattcgtaagttccagtacggtcaacataccgtgaccattgaaaccggtatgatggctcgccaggcaactgctgccgttatggtaagcatggacgacaccgcagtattcgttactgttgttggccagaaaaaagccaagccaggccaaagcttcttcccactgaccgttaactatcaggagcgtacttacgctgctggtcgtatcccaggcagtttcttccgtcgtgaaggccgtccaagcgaaggcgaaaccctgacctctcgcctgattgaccgtccgattcgccctctgttcccagaaggctttctgaatgaagttcaggttatcgcgaccgttgtttccgttaacccacaggttaacccggacatcgttgctctgatcggtgcatctgcggctctgagcctgtcaggtattccattcaacggcccaatcggtgctgcacgcgttggttttatcaatgaccaatacgttctgaacccgacgaccgatgagctgaaagaaagtcgtctggatctggttgttgccggtacagctgccgcagtattgatggttgaatccgaagcagacatcctgagcgaagatcaaatgctgggcgcagtggtattcggtcacgaacaacaacaggttgtgattgaaaacatcaacgcactggttgctgaagcgggcaaacctaagtgggattggcagccagaagcggttaacgaagcgctgtatgcgcgcgttgctgaattggccagcgcacgtctgggcgatgcataccgtattaccgagaaacaagagcgttacactcaggttgatgcaatcaaagctgaagtgaccgaatctctgctggcggcagacgagactctggatgcttcagaaattcaggacatcctgggcagcgtagagaaagacgtggttcgtagccgtgttctgcgtggcgagccgcgtatcgatggccgcgaaaaagacatgatccgtggtctggacgttcgtactggcgtattgccacgtactcacggttcagcactgttcacccgtggcgaaactcaggcgctggtaaccgcgactctgggtaccgcacgtgacgcgcaaaatattgatgaactgatgggtgagcgtactgactcattcctgctacactataacttccctccttactctgttggtgaaacaggtatggttggttcacctaagcgtcgtgagattggccatggccgtctggcgaaacgcggtgtgttggccgttatgccaagcccgagcgaattcccctataccattcgtgtggtttctgaaatcaccgaatctaacggttcttcctcaatggcttccgtttgtggtgcttctctggccctgatggacgctggcgtgccaatcaaagccgccgttgcgggtatcgcaatgggtctggttaaagatgaagaaaactttgtggttctgtccgatatcttgggtgacgaagatcacttgggcgacatggacttcaaagtagcgggtagccgtgaaggtattaccgcgctgcaaatggatattaaaatcgaaggtattacccgcgaaatcatgcaggaagcactgagccaggccaagggtgcgcgtctgcacattctgggcgtaatggaacaggctatcagcacaccacgtggtgatatctccgagttcgctccacgtatctacaccatgaagatcaactctgacaaaatcaaagatgtgatcggtaaaggtggttctgtgattcgtgcgctgacggaagaaacaggtactaccatcgaaatcgaagatgatggcaccatcaagattgcagcaactgacggcgaaaaagcgaaacacgctattcgtcgcatcgaagaaatcactgctgaaatcgaagtgggtcgcatctacgctggtaaagtaactcgtatcgttgatttcggtgcgttcgttgctatcggtggcggtaaagaaggtttggttcatatttctcaaatcgctgacaagcgcgtagagaaagtgactgattacctgcaaatgggccaggaagtgccagttaaggtaatggaagttgaccgtcagggtcgtattcgcctgagcatcaaagaagcgactacgcctgatgcagaagctccagcgcctgaagcagcagagtaattaagtccgttttcaactccttgccaagaggcagggagttgttcttatctcgagggcaggacgctcttgtgttaaacaagcggatgaaaggacgtttatccaatgtttgtcttcgggagtaggaaatgaagcctttcttgcgctggtgttacgttgcgacagcactcatgctggcaggatgcagcaacaatgattggcgtaaggatgaggttttggctatcccgttgcagcctacgctgcagcaggaagtgattctagctcgcatggaacagatccttgcaagccgggcactaacggatgatgagcgcgcgcagcttttatatgagcgcggagtgctgtatgatagcctcgggctacgggcactagcgcgaaatgatttttcgcaagcgttagctattcgtcctgatatgccagaagtttttaactatctgggcatttatttaacgcaggcaggcaattttgatgctgcctatgaagcgtttgattctgtactagagcttgatccaacttacaattacgcgcgtttaaatcggggcatcgcactttattatggcggtcgcttcccgttagcgcaggatgatctgcaggcgttttatcaagacgatccaaatgatcccttccgttcgttatggctgtacctggtggaaaaagaaattgatcccaaggctgccgaagtagcgttgaaacaacgctatgaaaagtcgaacagagggcaatggggatggaatattgtcgaattctacttggggaatatcagcgaaaaaacgctgatggaacgcctcaaggcggatgcaacggataacacttcgctcgctgagcatctcagtgaaactgacttctatttaggtaaacattacctaagtctgggggacaaggacaccgcttcggcgctgttcaaactgacggtagctaacaacgttcataactttgttgagcaccgctatgcattgttggaattggcgcttttgggccaagaacaagacgacctatcggaatcggaccagcaatagctgacggacaactattagcctgatataccttggttttaaccaatgtttatcaccttcgcgggtgatggcctttttgttcgttttataatctaatttgagccggttcacacttttcaatgaaaatgactgaaaattttctcgacgagttatgtagactggctgccattattaatgaggcacgtgtacatgactactgagcttgaaacctcttttgctgatttggggctgtccgctcctattctttctgcccttactgatctgggctacgaaaaaccatctccaattcaattggaatgtattccacacctgctgaacggccgtgatgttctcggcatggcgcagaccggtagtggtaaaacagctgctttcgggcttccgctgttgcacaacattgacccaacgctgaaagcaccacaggtgctggtactggctccaactcgtgagctggcagttcaggttgcggaagcattatctagcttctctaaacatattagcggcgttaacgtggtggccctgtacggcggccagcgttatgacgttcaattacgcgctttgcgccaagggccacaagttgttgttggcaccccaggtcgtctgttagaccacctgaaacgcggtaccctgaacctgtccaacctgagcggtttagtgttggatgaagcagatgaaatgctgcgtatgggctttatcgaagacgtagagaccatcatggcgcagatcccggctgaacatcagaccgctctgttctctgcaactatgccagaagctattcgtcgtattacccgtcgcttcatgaaagagccacaggaagtacgcattcagtctagcaatactactcgtcctgacatcagtcagagctactggaaagtcggcggcggttaccgtaaaaacgaagcgttggtgcgtttcttggaatctgaagatttcgacgcggcaatcatcttcgtgcgtaccaaaaacgcaacgttggaagtggctgaaactctggagcgcagtggctacagcagtgcagcactgaacggcgatatgaaccagtccctgcgtgagcagactctggaacgtctgcgcgatggtcgtttggatatcctgattgcaactgacgtggctgctcgtggcctggacgttgagcgtatcagcctggttgtaaactatgatatccctatggattcagagtcttacgttcaccgtatcggccgtaccggtcgtgcaggtcgtgcgggccgtgcgttgctgttcgttgagaaccgtgaacgtcgtctgttgcagaacatcgaacgtacgatgaagctgaccattccagaagtgatgttaccaaatgcagaattactgggcgaacgtcgtctggctaaattcgcggctaaagttagccagcagctggaaagtagcgatctggacgtataccgtggtctgttgactaaactgcaaccagaagatgagttcgatatcgaaactctggccgctgcgctgctgaaaatggcacagggcgaacgtcctctgattctgccaccagagccagtacgtcgtccgcagcgtgagttcagcccgcgtgaagaccgtggcaacgatcgtggcgatcgccgtgagcgtcgtccggaaagccgtgacggtggcgagcgtcctgcgcgtcgcgaacgtcgtgacgttggcgagatggaactgtaccgcattgaagtgggccgtgatgatggtgttgaagttcgtcatatcgttggcgctattgctaacgaaggcgacatcagtagccgttatatcgggaatatcaagctgttcgcttcccactcaaccattgagctgccaaaaggcatgccgggcgatatgctgtctcatttcacccgtactcgtatcctgaacaagccgctgaacatgcagctgttgggtgatgcgcagcctcacgaacgtcgtgagcgtgctccaggtgctggcgcagagcgtcgtggcggtggtcgttcattcggcggcgaacgtcgtgaaggcggcaacggtgctccacgtcgttcattcggcggtgagcgtcgcgaaggcggcaatggcggcgaacgtcgtggcaaccgtgacgctcaacgtccagctgccgcaccacgtcgtgatgatgcagccgctccggcagcagcaccagcccgtcgtcgtttcggtgacgcataagtcataatcatctgaatgatgaaaacaaaaaccagccttagggctggttttttttatgtctgtaattaaaggattagcttaaatctgcgtggggttaagcatatcttgctgtaaaccggcgacaatttcgaaggaacgcaggcgagcctgatgatcaaaaatctgtccgttaatcatgatttcatccgcctgagtctcacgcagcaaagattgcagtccgtggcggactttactttcatcgccaattatcgataaccgtagcgcctgatccacgccaaactgttccgccggtgaacagatgctggacatatcctgcaccggaggaggaagttgccctggtgtgccacgacgtagattaacaaactgctgctgcatggaagtaaacaggaagcgagcatcctgtacgctatcggcagcgacgacgttaacgcaaacaatggcgtaaggctgcgaccattcggcagagggtttgaagttctcccgatagagtttcagtgcctgaagcagcatgtctggtgcaaagtgagaggcaaaagcgaaaggcaggcccatagcggcggccagctgagcgctgtacaagctagaaccgagtaaccatagcggaacatgcaagccttgtcccggaacggcctgcactgcttgctcgggctgtgcttcggcgaaataacgctgtaattcacgcacgtccgcagggaaattatcttcaccggacaaatggcggcgaagtgccatcatagtgcgctgatcgcttcccggtgctcggcccaaccccaaatctattcgattaggatacagagaggctagggtaccaaactgctcggcaatcactaacggagagtggtttggcagcatcacgccaccggagccaagacggatttttttggttccagaggcgatatagccaattaataccgaagtcgctgcgctggcaatgccagtcatattgtggtgttcagccagccagtagcgttgatatccccagtcttcagcgcgttgagccagatccaatgacgcatggaaagcatcgcgaggggtttttcccttggctatcggggaaagatccaaaacggaaagggggataaggcgtttatcagtcatagaatcgtccatcttaccttatgtcggttcgcttgaagggcgagcgcatgaattaacctgctgctgtgaaagctctggtaaatagcgggtgatttattaccagagctgggaatttacctttaaagcataaatgaaattgcttgcccacaaggggaaataaatgcttcgcctgattggggcctttgtctcatttttatccgaattttgttcaattaaagtgctgttgagtattttatttcggctttggctttctcgttggaataagatggtgaaagtggtagttgataatgctgaaatgctgcgttaagaagtgaacataaaatattttatgctgtttcaatggctgcgggctggttttattgtgacggtaacagcagaatgccgattaaccattaattaattatggttaatcatttttgataggcatcacaaatgttaccgtgattatcttcggtttcatctgcacttcaatgagttctttcagtctatcttattaataatcaattgattagaatgctgcgtcgataatgacagcataaagtagcagggacagcgctcagagggagatagatcttcagaataaccctcttgaggtagaattattttctattgaggccagcggaagacatggatgttaaaacaatattctctgtacgcaagcgtaatatagccaaaaaataaaaacacctgcctgtctgataacgcctattttcagggcgatgatcggataactgactctgtacattttaataacgataaaacctactaaccagagaataaaggcgagagctattatggaaacggcaagttctaataagagcatcattttaattgactctccggcggcacagcgtgcaaatatgtctgaaagccaatggcgtgaagcaattaaatttgatagtacagattttggctgggtcattatgagcatcgggatggctatcggagccgggattgtgtttttaccggttcaggtaggattgatggggctttgggtatttttgttatcatcaattattggttatcctgcgatgtatttatttcagcgtttatttattaatacgctggctgaatctccagagtgtaaagactatcccagtgtgattagcgggtatttaggaaaaaactggggaataatattaggtgcactgtattttattatgttggtgatctggatgtttgtttattccaccgccatcacgaatgatagtgcctcttatctgcaaacttttggcgtgacggaaggattattatccgataatccgttctatggtttggtgctgatttgtgtcttggtcgctatttcctcccgaggggaaaaactgctgtttaagttatccagctttatggtgataacaaaactgttagtggttgcggccttaggcgtctctatggttggcatgtggcatctttacaacgtaggcctactgccaccggtgggtttgctgatcaaaaatgccattatcactctgccattcactctgacttccattctgtttatccagacgctaagcccaatggttatttcttatcgggcaaaagaaaagtcgctggaagttgcacggcacaaagcgctcagagccatgaatatcgcattcggaattctattttgtaccgtatttttctatgcggtttcatttaccttagcaatggggcatgacgaagcggtaaaagcttacgagcaaaatatttctgctttggcaattgcagctaaatttttccctggtggctgggcaacggtcgttagcgttattttaaatatattcgccgtgatgaccgcattctttggcgtgtatttaggattccgcgaagcaactcagggcattgtgatgaatatattacgtcgcataatgcctgcggagaaaataaatcagaaatgggtgcaaaatggaattatggtctttgccgtattattggcatggggcgccattattttaaatgcgccagtattaagtttcacctctatttgtagcccgatatttggtctggttggttgtttgattcctgcctatctggtttataaagttccagcactgcataaatataaaggtgtgtctttgatgattattatcatcaccggcattttactgtgtatttcacctttcctggcgttttcataagttaacggcatctgatattacctgctgtaaaggttgaaggtattcattatgagtcactgtagtcattcagagttatgggatgaattcatccgcgcggtaaaacaggaagttcaacccgctatcggctgcaccgaacctgtttcgttggcattggccgcggctatagccgcatctcatttgtcaggagccatcgaacgtattgaagcacgtgtttcccccaatttgatgaagaacgggatgggcgttactgtgccgggaaccggcatggtcgggttaacaatagctgccgccgtgggggcgctggctggcgatgctcaggcgggtttggaagtgctgaagcacattagcgcggagaaactggcagccgcgaaagctatgctgtctcagggaagcgttcgggtcacgatgcaggaaagtaaatatatcctgttttccgaagcgacgttatatagcggtgatgaatgggtgactgccactattgccggtgggcatacgaggttggttaacattgtaagaaatggtgaagtactgtttgcattcggtgattctggccatgaaattcatgatgggaatgaacctacactgggttattgcttgaagcaggccgatgctcgttcagtttatcagttcgccacagaggttccatttgagcgtatcgcctttattctacaggcggcgcgactaaatggtgcgctgtctgatgaggggttgagcggcaattatggcctgcatattggtgcaacgctggctcgccagcggcagcgtggattactggcgcaagacttattgtcgaatattatgattcgcaccgctgccgcttcagatgcgcgcatgggcggggcaacgttgccggcgatgagtaattcaggatcgggaaatcaggggattgcggccactatgccggtcgtggtggtggcggagcatctgggagccagtgaggaacagctggcgcgggcgttgatgctatctcatctgatggcgatttatatccatagccagctcccgtcattgtcggctttgtgtgccgcaaccaccgcttctatgggggccgcggcgggaatggcatggctaattgaaccgggttatgacgctgtagctatggcgattagcagcatgatcggcgacattagcggcattatctgcgacggcgcggccaatagctgcgcgatgaaagtctcaaccagcgtaacggcagcttataaagcggtgcttatggcgttggatcacagcggcgtaaccggcaacgaaggcatagtcgcgggggatgtcgatagctccatttccaatctgtgcgctctggcttgtggcgcgatgaggcaaaccgatagccagattatcgatattatggctcataaggcatgtgtctgaaatcacgctaaattaggcaaaaaaatgggagaggcagaaatacctctccctgtttatttccaacttatcgaaccttaagaaaccagttccaaaccggctacccgacgccagtaaccattgcagtcggctttatccgtcagggtcagcggagccagacctttttcattggcacggaatttatcgatcatggtgagcgcttcggtactgtgtggcgataaacgcacgatatccaccaatccttgcatagaaattaggtcattacctaggttatagcagtaaccactttgcgtctgaatgccattgagaacaaatacttgctgattttcctgtgagagaatactgcgcccctgagggtacttgatgcagcaggtctcgcactcgtctttagctcgatcctcggaacgagcggtaaagcagcgagccgaataagctaacggcagatagccgtaagccagcacttctacttcgaatttattacggaatcccagctcatcacactgaatcagcatgttttccaaccagtctcgcgagagctctaccggcatacaccaacgcatcatgccctgacgatgtagaatacgcagggtataggcgttatagcagttgagcgcgtggcctgctacgaagggcagtcctcgctcagcggccatattcaccgtaccaaagtcattggcttctaacagaaaatcgccgttttctacataacgtttgagttcagtcagttctgaaggggcctgtagcaatgcaagggtagaaatcgctacctgctttccgctggaagcgacttgtttcgccagttccagccagtcgcctactttcatttcacgtcgtttggtacaaacgttttcaccaagataaataatatcggcactgctttcacaggctttctgatagaaagcctcaatatctgtttttggccagtaataaagcactgcgcccaatgagtatttcatgctttttccaccctactgccacttgcgatgataagcgcccagcgttgtttgggtgccttctgacatcgaacctagttgctccatccattcggtttttgctgcgaattttgccggttctttctgatagaggtcgatggcctgacgccagactttagcaacctggctgacgtaagccgggctacgttggcggccttcaattttgaccgaagcgatattggccgcgaaaagttccggcaacagctccagcgtattgaggctggtgggttcttccagcgcgtggtaacgctgcccgtcaaccaggtagcgacctttgcacaacgtggggtaaccggcgttttcatcgtcctgatagcggtcgatcagcacttcgttcaggcgggattccatgccctgcggcgtctgttgccagcgcacatagcgggccggagaacaggcaccgacggtattgggagattcaccggtaagataggaggaaaggtaacagcggccttcagccataatgcacaggctaccgaaagcaaaaacttccagcggcaccgggctggtgcgggaaagctgttttacctgatgcatagacagcactcgcggtaaaactacccttgctacatcaaagttgcgttggtaaaaacggatggcctcgtcgtttgtagccgaagcctgaaccgaaacgtggcgttccacctcgggatagcgctcggcggcatattccagcatcgccaaatctgccagtatcaacgcatctgcacccagttgagccgccatatcgacggcgcgttgccagcgggaaaaaccgtccggatgggcaaaagtgttgatggcaatgtgcagcttacgtttccggctgtgaacgtaattcaccgcctcttgcagctttttatcggtaaaattcagtccggcaaaatggcgggcgttagtatcatctttcaagccgatgtacacagcatcagcgccgttatccaccgcagcttttagcgcgggcaaattaccggcaggacaaagcagctccatagaaatttcctgaatgagtcagcggcaatacctcggcattaccagaggtagtaaataatcctcatccgtagatgatcgtggtgacatggataattttaacgaggagcaattttagttaacctgctgcagacatatcttgatttggggcagtttcttccgcattgctgatagtgttctgatatttagcaaagaaagcatcggtaatctggtgcagaatttattgatttagtccgcgtgggtcgtctatccgtgtggcaaaatagaaaccgatgaattcaaaggagtcagcctgtgttgggaaaactacgagcacaccttgtgcgccaagggcctgcgctgctgcgggccccgctgaaaattacgccttttgctgtgcagcgtcaggtactggaacaggtactaagctggcagttccgccaggcgcttgaagagggcgatctgaagtttcttgctggtcgctggctgaagattgaagtgcgggatctcgcattacaatggtttatgacagtggaaaacggtaggctggtggtgagccaacaggcggacgctgatgtcagcttcagtggtgatgccaacgatcttgtattgatcgctgcccgtaaagaagatccggacacgctgtttttccagcgtcgactgcgtattgaaggggataccgaattgggcctgtatgtaaaaaatttgatggatgccatcgagttggaatccatgccaacattgctacgagtgggtctgcaacaactggccgattttattgaagcagggcaacaagagggcgcggagcagacttcccgtgccgtggtatcgtgttgatccgtaccgagatcccagtagacgcaccggggatcgataaactgctgcgtgagtcttttcccagcgatggggaagcaaagctggtgcaacaactgcgtgaagacggtttactgacgctaggtatcgtcgcgaccgatgatgaaggtggcgtggtgggctatgcagcattcagcccggtagatattgaaggggaagatcgtcagtgggtcggtttgggtcctctggccgtgaaagaagatttacgttgtcaggggttgggcgaaaaactggtatatgaaggtttggacgcgctgaatgaattcggctattccgccgtggtggtactgggcgatccggcatactatcagcgttttggtttcaaacctgcggctgacgctcagctatattgccgttggccaggttgcgaagcggcatttcaggtttactcactggctcccgatgctttggatggagtcactggccaggtaaattacgccgaagcctttaatcagctgtaattattgctgatttttcaggtaacagtaaatctgctacacaagaaggctggtcgcgtaccagcctttctttttgcttttttgtcagctgtttcaggcgatattccagttttagcgcggtggagcgatcgcccgccacgcagtgaaaaaccaggttcaattctccttttcctcgcaaagatttagcgcctttacccgactgatgctgtgccagacggcgtgaaacatcggtagttataccggtatataaactgcctgcggcggtacgaatcagataaatagaccagatgctttccgacataacgctctctgttgaatgaggggcgggaatattatcgtcggaatcaggactgaagcacggtttttttatccggtatgaaaaaccggaggaaacaacgcggacggcaaagggcttgccgcccgtgaagctgctgcttatttggttttatctgccagagcaaagcgaggtgaaaccaggccgtagagcgtccagcccaggaaggtcacaatcgcgccccacatcatggcttcctgacctgagctatacagggcgtagaagctatacatggcaccgataaaggcaatgatattggctcgacgagccttagctgccggtacgttagcggctttttgaatgataaccaaagcagccatagacaaaatatatggaatgatgttggttacgaccgccagattgaccagcacattgaactgtttattcagcgatgggctgatagtcatcagagacaggacgctctgaataatgacgatggtcaacatgcctttgatcggcgcattggctttactcactttagagaagattttcgggaagaaaccttcgtccgcagaggatttgaatacctgtgcgatggtgaactgccagccgagtagggaacctacgcaggacataatcattagcgccataattattttacccacggcaggggtaaacatataggcaaatgccagaccgaaaggcgcagtggaattagccagatccatgtttggtacgataccggcaatcacgttggtcgaaataatgtagataaaggccgcgcctaaagtaccgcccagcacggcgataggaacattacgctcaggattttctaccgcatcggtattggcacaggcggattccagacccaggaaggcccatagagtcatggagatggatgaaccgatagcttcaaaggttgggaaaccgtgtgggttccaggaggcgacataggcatcggcgctaaaccaccaccaaccgataactgaaatacccagcacaggaatgataacgccccaaatggttacactactgatttggccggtaatgcgtgcgccgccaaagttagcgactgttgctaaccagaggacgccaatggtcgccagacagatccccagcgggctgagagtgctgcccagcaattcagtaccatagccaacggcagaaatagcgatggcgatattggcgatcagcaacgatgcaccgtaggtatagttcgccataaagttgccggatttaccaaaggcatattcggcgtagccgcccataccgccagatttacggctgaacatgccgcattgggcgaaagcataggccagcgccatggaacctacggcggtgacaagccaagatacgatagaaatggtgccgacttcggcgagtttagttggtagcataattatgccagaacccatcatgttaaccgccgtcagaatggttaactgtactacgcccatcttattattagatttactcatattattttctctttttatctttcagagactgcggagataaatatccccgcaggtttgagtgtcatttttggtgttgtataaataaaatatttattattttttcatcatgtagccgtaggcgcgattccagccgtcttcgtctacttgtaaatacacgccttgtaattctggtgcaaagccaggcaataaattgatgctttcttctaatgccaggaaataacgttgcgctgcgccaccccaaacttccccaggaacgacacacaatactcccggtgggtaaggaagcgcgccttctgcggcaatacgaccttctgctttacataatggaaccagctctacgttgccacgaacaaattcaatattggcatcttgcggattcatcataactttcgggaaatattgtttacggaacatttctttctgcaattgttttacgtcgtagctgacgtaaaggtcgtgcatttcctgacacaggcggccaatggtgtaacctttataacgggcttcattattgcgatagaccgttggtaatacgtcgcacaacaaagcatcttcttcaatgaaacgctcgaatcgggcgatttgcgcaaccagatgctgcatttttgccaggtcttctgcaggtgttaataagaacagaattgaattgaggtcacatttttctggcacaatgccattttcccgcaggaaattagccaaaatagtagctggaatacctgattgagtatattcaccagtattggtatcaattcctggcgtggttaataatagcttgcaagggtcaacaaaatattgggaagcttcatacccttcgaaagcatgccatttctcaccgggaataaagttaaagaaacgcaagtcttgcgccatggtttcagtgtcatattcttgccacggttttccgtctacgctaaccggaacgaaaggcttaatcatagaacaggtatttaacagcattttacgggcttcaatcccgtttttaacacattccaaccacatacggcggccgctttccccttcatgcattttcgcattgacatccagagcggcgaataatggatagaatgggctggtggatgcatgaagcataaaggcgttattaaagcgtttatgattacagtaacgatcctgacctttaatatgtttatcttttttatgaatttgcgacgtttgagagaagccagcctgttgtttatgtactgactgggtcacaataatacccggatcgttttcgttcagctccagtaataatggtgaacaatccttcatcattggaataaattgttcgtagccaacccaggcggagtcgaacagaatgtaatcgcataaatgaccaattttatcgacaacctgacgagcgttataaatggtgccgtcgtaagttcccaattgaataattgccaatcggaaaggacgaggtgcatcagcacggtcaggcgatacgctacgtatttgttcacgcaggtatttttcttcaaaacagtgggcatcgataccgccgataaagccaaacgggttacgagccgtttccagataaactggcgttgcgccagcttgaattaaggcaccgtgatggttagatttatggttattacggtcaaacagaaccagatcgccacgggccagaatcgcattggttgcgactttattagaggctgaagtcccgttaagaacgaaataggttttatcggcattaaatacttttgccgcgtgtttctgtgcatcgcaaggcgcgccttcatgaatcagcaaatcacctaatttgacatcagcgttacacatatctgaacggaaaattgtttcgccataaaaatcgaagaattggcgacctaccggatgtttgcggaagaattggccgccctgatgacccggacaggcgaaagtagaattacccatttcaacgtattttgttagtgtgttgaaaaatggtggtaatagctcattttcgtatttttcggcagcagattctaattgtttaccgtagaatccggtgttgtcaccgcacaattcaaatacgccattgagggaaggcaatacatcattatttagctcttcttcgcagcatacggcagcgaaaataggaatgttaaaccctaatttatgaatggaatcaataacgccattatttatatcttgaactgataaaaccaccgctgaaacatcggtaaaatcagtatgtaaaacatcaacaatttcccgctgggtttcaaaacaagagattgctgaagcacttgccgcaatatttaattttttcatttttgctctcttttatttagggtgtatcaacccgtccaacttgtaggtgcgttggatttcgtttcattaatttttttgtatagcaatccacatcaatgacgttgagacattaattatttgaaatgctaattttcgcctgcactgtttctcacctaaaaaataggcaaagaatttcttaagccattaaattacggcaaaagttcacatcacgaattaattggataagttaacgaacgatttattccgacagatgaaaaatgtaaatctgtaggttaagtaaatcgataattaagcatcatttttgaaacagacaatagttaaccgacgccaaatgcattcgcaattttcgcacaagctaaatattgtgtttatgacaatgacgatccaataagtacggatgtcatcgcaggagggatattatctgtaatggaaataagagaagttaaaatagctacgatgagccggcatcataagatgagttgtccgccttatatgcgccatcttcttgttgttattttccattttcgtaacgtctctttgtttttgaacaatgggttgatgcgggctattctagcgataacactcattcattccgtgatgtgcgtcacattttgttcggattttaaaatgtgttttgactaaatcatgaatatatttacttctttattcatctatttcggtttttatgcgtttttatgattattttcacgagagcgcagtaagttatatttaacatacctgacacatagaaatatcctaataggtttattaatagaattgagagcgcactcacccgtaaattgttttctatttgttaattctgattaattaaatcttaatcgagatttatcccgtttttatgcatataaatgcaaaatgggtttatataagaaatgatagctaaatcactattagatacaatttagttatgtctttctgctatttcatccaccggataacagaacaattagtcctgcctgaagggaaatcttgtctggctcatttcgcgttttgtgatcgggttcggttacactgcaatgataatacagaggagctcgcagtgaataatccagatgatttacaggtgattagccagtttttactgaagcagcatgtgttgacgctgtgcgcaagccacgcgggcgatatgtggtgtgccaactgtttttatgtttttgaaccgcagcaaatggcgttatttctaatgacggaaggccatactcgccacggtgaactgatgcagaaaaaccctcaggtggtcggcactattgctacgcagcctcgcagtgtagccttgattaagggagtgcagtaccgaggagagattagtttgctaagcggtgatgacgataagttggcgcgtcagcgttactgtcggcgctttcctatcgcaaaagtagcctctgcgccgatctggcggctaagtttgcaagatatcaaaatgacgaataataccttgggatttggcaaaaagttgtactgggtacgcgactccgcgtgaaccaccaaacatcttgctggcttatgccatagtgccatttatttcattcgcgtattgtcttcacgggagcgttgtctccatccaaatattatctttatccgaatcgtgttttcatttgggtattgtggtggaaaagtatccccgttgttctggcacgatgttttccctgcgcggtttcttcgatccggctattcttatcttattcatggggttaaggagatttaatcgtgaaggttttattattgggcgcgagcggtctggtcggtggggaactattaagattattgcggctagatgccagaattagccacatcattgctcctacgcgtaagcctttgtcggtaatgaataaattgactaatccacaggctgacgatatgagtactttgctgaaaaccttaagcgctccggtagatgcagttttttgctgtctgggtactacccgtaagcaggcggggactcaggcggcgtttcgcgcaatagattatcgtttagtggtagaaacgggggaaaccggcctgcgactgggtgcgcgccatttgttggtggtaagcgccatgggggccaatccgcattcctggctgctttacagcagaaccaaaggtgaagcggaacgagcgttgagtcagcaaggctggccgcaactcagcatattccggccttctatgctgaccggtaaacgcccggtaccgcgtctgaccgaacgtttgaccgcgccgctgtttgcagtgctaccgaagaaatggcgttcaatttccgcaaaaaatgtggcgcaggcgatgttgcagcaggcttttacggttgctcacagcggcaccgtgattatcgaatcggatgccatgcagccggcgggaaaaatttcggataaccgatctgcttcctagagtatgatcacctgattatcgtaggctgcggcaacgccggcgggcagcaagttattcatcagccagcaatccaactggtggctgacatgggtgagcagggtgtttaccgggagtaattgccggtggatctccaaggccatgctcacatcattatggttgcgtggagcattggtttgcggcggatgactgcaatccatcaccagaagatctaacggcagccgagccagaaaagcggtggtagactctggcagaccggcggtatcggtcagataggccagcgttcggcgcggactttggtagagataaccaaaggttggttttgagtggttgagcggcaggggcgttatctgtaaaccggcgatgtccagcggttgaaaaggagttaacggcggttggaaatccagtattccagagtgtttgaacaggtcgtcgcagccgtcggcatccggcgggccgtagacgggaattgggctggaatagccccaacgtaacggaaataacccctgaacgtgatccatgtgataatgtgtaagccaaaaacgctgaatttcgtccgcagaaaaacgctctcctaacgtcggtaaaccggcatcaataaaatgcgattctccctgataacgcagcatggcgctgcatggaccacgccgaaatctgggctgctgacaggcgcgctggcaggctgggcaatcgcagccgaatgccggaacctgctgtgctccgccggttcccagaagggttagctgcattttattttccactcataagctcctgcgaatgcgtatttaccaccagttgaatcagatttttcagccggtgtaaggtatcggttagcgaaccatcattatctagccgtacacaatgggcgggtaaacgttgctgataatgcgcagctcttgccagacgttgagcgatttgagcctcatcttcgcgcccacgctgtagtaaacgctgccgcagaattgccggagacaccgccaggcagaccggcagcagtcggtgcccatagcgtcgctgagcgtgggaaagatgcgcccttgagccattggctaccacatccagccctttttccagccacaggtctatttccgcgcctaaggcataatgatgctgatgtgcctgccagcttaaagcaaacagcccctgcgcctggcgctgcaagaattcctcctcgctcagtgcaatatgattttcagcaccggcatctgctgggcgagtgatatagcggtgcgctaccagaattttatgttgctggtctttgcgtagcgcggaaagcaggcaatccttgccagcgccggatggccccatcagatagattaagtgcgccatcagaacacccgaatgccttgacgccagacgttttgcacgtagacgtgttcgccctgatttctcgccaaaaccagatccgctcgcttaccttcttcaatgacgccgcgatcggttaatcctaatgcgcgagccggattgcaggtcaccaacgctaccgcctgtggcagagagaaatcgttgcttgcatcctgagcaatacggaaagcggcatccagcaaactggccggatagtaatcggaagagagtatatccaacacgcctaatgaggccagcttatgggcggcaacattgccggaatgcgagccgccgcgcacgatattgggcgcgcccatcagaacttgcataccgtgctgatgagaggctcgcgccgccgcttccgttgtgggaaattcggcaataacgctgcctagcgcctgagattcagcaacgtgctcggcggtggcatcatcgtggctggcgagagaaatattgcgctggcggcaatgggctgcaatggcactgcggtttggcgccgcccagcgagcagatagattgatttgttcttcttcaaactgcgccattttttcatcattaagatgatatttgccctgatagtattcccgatatttttcacgggaggcgaattgacgctgacccggcgaatgatccatcagggaaactaaagatagctcgggttgatccatcagtttttcaaataatggcagcgtggtgtggtgaggcaattcacagcgtaaatgaatgcgatgttctgcccgatttaaaccagcacgctgactattcaccaccgcattaatcattttctgtaaattctccagccgatgaccgccgtcgcgcacatcgcccacggccaccgcatccagcaccgtggtcataccgctggcaaccatgagcgcatcgtggctgctcatggcagaatgtgcgggccagtctacgttggggcgcggggtgaagaatttgtccagattatcggtatgtagctcgatcaacccaggtaatagccagccattgtcaccgtcaatggcttgaggcagttggctggggcgatcggtaaaactgcgaatcattccgtcctggatctccagcgatccggctatcgtgcgatcttgcagaaccagtttcacattattgaggatcatgctgggatctcctgaagggtgtcgaactggggcggcgtcatgatctgcaagcgatcgctgacgtgctggcgtacggcctcatcatggaaaataccaacgatagccgcgcctcgctgtttggcttcatcgatcaggctgaccaccgcagcgctgttgacgttatccagtgaagccgttggttcatccagcagcaaaatggggtaatcgacgataaaaccgcgggcaatattcacacgctgttgttcaccgccggaaaaggtcgaaggagccagatgccacagacgttccggcacatttaagcgagtaagtaatgatgccgcccgttcctgacaaatgtggcgttcaacgcctaattccagcagcggctgcatcacgacattcagcgcactgatacgcggaatcacacgtaaaaactggctgacccagcccagggtgtgacggcgaaccgctaaaatctgacgggcttcggcatgcaccatatcgatccattcgccctggtgttttatccaaatatggccgctgtctggcaaatagttggcgtaaagagagcgaagcaacgttgattttccgctgcctgaatggccgtgcagtacgacgcattcaccgctgtttaccgccagttctgcccgatggagtaccggtaagcgaatgccctgttgctgatgtaatacaaaggttttactgaggttttcaacccgtaattgctgattcattttctattcccgcaaaggccgaagggtgtcgcgtcaaggtgtgcatcagttttgcagcaccgatgacactaacagttgggtataggcgtgatgcgggtcgtccagcacccgatcggttaagccactctcaatgactttcccttctttcatcaccagcagacgatgtgccagcaggcgcgcgacgcccaaatcatgggtcacaataaccaccgccaactgcatttccacgaccagactgcgcagtaaatccagcaatcgcgcctgaactgaaacgtccaacccgccagtcggttcatccataaacaccaattttggatgagtcactaaatttcgggcgatttgcagccgttgttgcatgccaccggaaaacgtcgtcggtagatcgtcgaggcgagaaatcggaatttcgacgtcttccagccagcgtccggcctgttggcgaatctcgccgtaatgacgctggccaatagccattaaacgctcgccaatgttgccgcccgcggatacctgcgggcgcagaccgtcgagaggatgctggtgaaccacgccccaatcggtacgtaacaggcggcgacgctggctttctgccatcgcgtacagatcttgttcttgctgcccgtcgggtcgataaatgatttgtccctgttggggagccagtcgcgcggaaatggattttagcagcgtggttttccccgatccggattcaccgacaatccccagaacctcaccgggatagagctgaaaagacacatcgctaaaacctttgcccggcgcatataaatgggtcagattttccactgaaagtaacggagtcgcggccagttgtgcaggtttcatcaggcattcacctcggattggctggccgcagcggtatcgctaagctgttgttggcaataatcggtatcggaacatacaaacatacgattgccgagatcatccaacaccacttcatccagataactgtggtgagagccgcatagggcacagggttcgtcccattgctgaacggtaaagggatgatcgtcaaaatcgaggctttccactttggtaaacggcggaagggcataaatacgcttttccctgcctgcgccaaatagctgtaatgctggcatcatatgcatcttcggattatcaaatttgggaataggagatgggtccataacgtagcgatcgttcaccttcaccggataggcgtaggtagtggcaatatggccgtaacgggcgatatcttcatacaatttcacctgcatcacgccgtattcttccagcgcatgcattttgcgggtttcggtttcccgcggctcgataaagcgcagtggttcaggaatgggaacctgaaagatcagaatttgatcctccgccagcaaggtttccggaatgcggtggcgagtctggatcaaagtggcatcggtagttttttccgtggtggctacgccgctgacccgctggaagaagtggcggatagaaaccgcgtttgtggtgtcatcggctccctgatcgatcactttcaggacgtcgcagcggccaatcacgctggcggtgagctgaataccgccggtgccccagccataaggcatcggcatttctctgccgccgaacggcacttgataaccgggaatggctacggctttcagaatggctctgcgaatcatgcgcttggtttgttcgtccagataacccagattgtaaccggtgagaacctcagtcatggtgcggctcctgatgttcggcccgatactcgctgcgcaggcgtttcagcagttcaagttcggcctgaaaatcaacgtaatgaggtaatttaagatgggaaacaaagccagcggcttcgacgttatcagcgtgagacagtacaaattcttcgtcctgcgccgggctggcgatgctttccccgtattgctgggtttgcagggcgcgatccaccaaggccatcgacatggctttccgctccgctcgaccaaacaccaggccgtaaccgcgggtaaaatgcggtggacgatcttcgggatcgacaaacccgttaaccatttcgcactcggtcagcaggatttcgccaatatcaatggtaaaccccagctcctctggcgcgatcgacaccgtcaaataaccgctgcggatctcgccggcaaagggatgcgtacggccatagccgcgctgggtggaatagctcagcgccagcaaaaaaccttcgtcgccgcgtaccaattgctgcaaacgcgcagagcgattgcaagggaaaaccggcggattgcgggtgatatcgtcgggctgttgcccgtcgtcttgttccattaatgcaagctgttcctgtactaataaatcaaacacatgggcgcagttctccggtagcgcttctccacctttgggcgcagcaggcacatcgcctgaggccagcagggcgaaatccagcaggcgatgggtgtaatcgtaagtcgggccaagaacttgtccgccgggcagatctttgtaaattgccgagattcgccgctccagacgcatattggcagtattcagcggctggctgacggcaaggcgaggcaacgtcgtacggtaggcgcgcagcaggaagatcgcttccaccagatcgcctccggcctgtttgatcgccagcgcggccagttcaggatcgtaaattccgccttctgtcattacccgatccaccgccagacccagttgttgctcgatctgctcgcagtcgatcgccgggatttttggatcaccgcgtcgctggtgagccaagagttgatgggcggcctcgatggctttttcgcccccttttacggctacgtacatcagcgcacctctacttgggttgttcggggaatggccatcagatcttctccacaggccaataggacatccattccggtggggaaagtatttggccgattaatcagatagttcagtatcgccgcaggtaggtgaggagcgatttgacgctgttcttcaatgccgggcccacgcaggtgtaatggcgtgccttgttgcaggttatcgacctgaataatcagcgtaacggaaagctccggcgacacttcatcgcccgtcgggcagatctccaactgctcagcggctatgtggtgacgaaataccgcgaaaaccgcctgctgagtggcgatagcttccggcgcgccggtatgaaaacgtaggttttgccgaatcaaatcgttatttaaatcgccatccagataaacggcggtttcctgatctgccagcgtcagcaacacgctggttgccgctgggttaagttctttccagccctgacgatgcggcagagtgacctgtatacccggttcgctgagcgctttgaggatttggcgaaaggcgcgttgggaatcgtcaatgggttgatcaaaatgattaagcagtgtcatcagtcttctcctcgcactaaagtgaagaagtccacccggctggtggcaatggcgcgagcccgctgctggtggcgctcttgctgcaatgctgccagtggggtaatcaccgttttttgcagcaattcgtgcagcgcagtttgctgtagcagggcatccaacagcgcgcagcgttcggcatggggtttattgcgtccggcaatgtagctataaccataaatttcatcgttttcttccagcctgactaccgcgcgagtgatggtcatgtctccgagaataaagcgtttcccggtagcgcccattctggcctgtagctggtttaggccgatttctggcgcgcggataacctgatagcgcgggctgagattcagcgtctgccagtgagcgagcagatcttccggttggctgtgagccaatactgacatccagccctgccgggtagagttactttccatttaatgctccatggtcagttcgatcatgtcggcacgggtcaggctgacggagtactccgcaaccttattgctaccggcatgaatattcagagtacgcacacacagcagaggcgcgtgggtggctatttccagcagacggctttctttcgcctgcgcgcgacgagcgctgatacgggtctgacttcggttgagggattggcccaattgctggctaatgaactgatgcaaagagccggaggaaaactgctgtagcactggccaccaggtgagatcgggcagatagtgatcgattacgcacaccggcacgccgttaacccgacgcaaagtgcgtaggtgaatcacatgttccccttcgagcagcgacagcgctttggcgatgtgatcggtgcaaggacgtagcaccgccagcaaccgctcgctggtgggatcgctgccctgttgtagcaggttttggctgaatctggcctgagcgtgcagcgggtaatcgtaagggcgcatgagcaccaaaatgccaataccctgacggcgctgtagccagccgcgctgcaccagctcatctaccgcccgacgcagagtatggcggttaacctgatagcgatccgctaactgttgctcagagggcagataatcgccgcagcgatagttaccgcgcagttcttgctccaactgggcggcaatttgctgatagcgggtgggaaaactggtcggttgtctagataactgcatggcgggtataacctccatcaatgtaataagcccaatcccctttgctgaacaatgtagtggaagatgggtaagcgaaatcatgggttggcttcatggaatttactcatcaacgatctgccaactatgctggcaagctttaatgacagttcggttatgctcagatggcataacgatgaatctttttagttacgggaagaaggaaggagacaaaagaggaagtttgtcaacgctgagaggaagatgagtgatttcatacgcatactttttctgtatgaaaaaacatcaaatagattaaaaataaacactctgttaactggaatgaaatataagtgcctcttacaattaattagcgccgccttggcgttatcaacgtagggggttgcattatgtgccctaaaaatctcggccgtttgagcaaaataagcctggcgatcctcctggcttgctcattggcggcatgtagtgggagcggtggtggctccagcaacaccgcgaaaggtagtagtggtcagacaacgggtagtaccgccagcggaacgggtgacggcacgacggcaaacagcggtagcggttctgggtcaggctccggcgctggcggcagtggaacaggtactggtactggtactggtggtggggctggcagtggctcaggtggaacgggttccggcggtggaaccggaacaggcacttctacgcctcctttagtcgtcggaagcgtattaggcggcgtcggtggtgcggtcagtggcgtgggttccgaagtaaaagatgtggttagccagactccggttggcagcattcctattgctggtagcggcgtggtcacagtggtggatagcgcaggtaatgcggttaccgatatcggaagtggtatccagaacggcgttggacaattaggtaataatcctaatgcattaggtgtgacggctgcgggtgtaccgaaagccgtggcggatgtcggcaccggggtttccggcttgggtagtaccgtcagcggggtgggtaataatacgccgctgggtggcgtaactaacactgcgggtggtctggttgcaggggccggtggtgcagtcaccagcattggcaatggtttatcgcaggatttgcaaaccggcgcgacttctaaagtcaccacggcggcaacgggtctggttacgccagtggttgcagatacccaaggcataacacaaagcgtgggtggtgcaacggggctgggtgcacctgtcggtggtttactgaatagtgtaggtaacactgtgtcggcaacggggactcaagttggagcagcatcaccaacgctggctggcgtaggtcaaacgctacaaagtaccggccaggccgttgccagttctggtggggtggtgacacccaccacgacgaccggcggtggattgttaggaggcgtgaccgccggagctacggtgagcggtagcgccaatactaacgtattagctccggtaactaataccctaggtggcctgaccgcaggcgcgggtgttaccagcggtacggcaactaacggcggattactcggcggcgtcactaatacgctaacgggtaacgcaggggcaagcactaacaccgccacaaacggtgggttattaggaacaacaatacttaataaataacagaacctattacgctcccctgaagcattggggagcgcttcttttgctccataataaatttatgcgcaaatgcaaataaggaaatggacgatgaagaacagaatttggctgttttttttattcattgccgtggcagaaaataccttagcaaataccgtcccgatgttaatcgatcaaaataacccttcaagactcgcgcgtgaaatacctaaaccccaaccggccagaccgcagcctcccgcgttaaacacgccagccccttctcatgcgttaacgctagatacactcatagacgttcgccatttggattttattggcggcactcgctacgatgctaaaacattgctggccccttttgctccttatattgggaagaaggtgccgctaaagaatttgatggttgctactcaggctattaccaaattatatcaacaggatggttatgtattatcctacgcctatttaccggcagataattttaataacggtacattaaaaataggattggttgagggatatattggcaatacgctaattaaaagtgataacgccgcattggggcgttggctaaccaaattatccaagcgcattatggctgataagcctctcaccaaagaggttttcgaacgctataccattttaatgagcagaacgccggacgcgaaggttaccgccacggcgaaaaatcctaacaatatctacggcgctacggttttggaagttaaggccgatcatccgcgtagctggaatgtcagcaccgcgctggatagtcgtaaaggcgtatataccggtgtactcaatgccacttttagcggttttaccggttatggcgaacagttgggcgtcgcgacactattgcctatcaataataaagataacgatcgttatctagggctgaactaccaacaatatttgggtgataacggcctgctgatgcagttgaaaggcagttactataaacagaatcctaaagactacaccgatgttctgactttgcagccggacaatattaccctgtcagcgcgcgcggagcagacccaatataacggcggggtagttttcagttatccactgtatctaacgcagaagaaacaatggacggttagcggcggtctggattatgtggataaaagctacgatctgaaatcccgcgcccgattcaataacttcaataatcaattacgggatttgccggatcaaaatcagagtatgcattacccggcggcagaagtggcgttgttgggctatcgggaatatacccaggcttattggagtacccgctttagcgttcgacaagggattaacggcgcgctggcaagcagctctacgccttggggggatttaggattcactcgctggaaagtgaatggagataccgcctatttgttcgcggagaaatggcgtttaagcgcgtcggcagaaggggattggtcggataatgtgttaccggaagcggaacaggcaacttttggcgggctgcgttatggccgcggttatcctgatagtgaggccaccggtgactatggctacggcgggcaggtggaaatgcgctatatccataatcgggaggggcaatggctgaaaaccattcagccttatatgctggtggatacggccagaaccttcttcaatacgccgcagctaccggcgaagaaattggcgtcttatgccgtgggcgtcacttttggcgataacaaacattattctttctcactggaaggcgcgcggccaatcggcgatgtcccaagcgatagtactcgccgtgactggcgttttaacgccaccttcacctataactttgctaactgatttttacattatgatggtgtgaggaatgcttccgcgtagtgtcagcggaggcacagttttatcgaggtttaacgcagtttatgcacgatttgattactgctgccacgccaaattagcgagggatctttgagaccctgcacaaatttcccgtcgatcaatacatttatcaaatccaccacttcgcgctgttcattgcttaactcagccaattcgtagccagtccataaccagatatctttattatcgcattcggcatgcacacgcttaaccagtgacaaaatagcggagagattttctggatgcagcggatcgcctccggacagggataacccttggcggcggatgcgggtgtcattcagatccgcaatgatctggtcttccatctgtattgtgaatggcttgccggaattgagccgccaggtgctcttgttatagcagccggggcattggtgtacacagccggaaacaaacagcgtacagcgggttccggggccattaatcacatcgacaggatagtattgatgataattgatgatctttgtccgacgttagttggttagattttcagggcgacctattggccgcccgaatactcttaaatactgactggattaacccaactggccattggccagatgtttaacccggcgcttcacttcttcctgcttcccggcgttgaacggacgcgcatccggacttcccaaatagccacacacccggcgcgtcaccgagactttggacggctcgtgattaccgcatttcgggcaggtaaaacctttgctggtgcaggaaaactcaccggtaaaaccgcattcgtagcattcatcaataggtgtgttggtgccgtaataaggcacgcggtgatagctgtaatcccatacgtcttctagcgctttcaggttgtgctgtaggtttggatattcgccgtagcaaataaaaccgccgttcgccaacggtggataaggggcttcaaaatccagtttatcgtaaggattaaccttcttttccacgtccagatggaagctgttggtgtaataacctttgtcagtaacgcctggaacaatgccgaattcggcagtatccaaacggcagaagcggtcacacaggttttcactcggcgtactgtaaaggctaaaggcgtagccggtttcatctttccagctatcggttgcatctttcagatgggaaacgatggcgatagctttgtcacgcagttgctgatcgtcaaagacgtgggtttgattgccaaatagcgcgttaaccgtttcgtgaatacctatatagcccaaagaaatggaagctcggccatttttaaatatttctgcaatattatcatcggcttgtagtctaacgccgcaggctccttccatatataaaataggcgcaacccgagctttgataccttccagacgagcaatacgtgtcatcagggcttttttcgccagcgacagacgctcatccagtaactgccagaagcgagcttcatcgcctcgggattccagcgcgatacgcggcaggttcaggctgataacgcccaaattgttgcggccatcgtggatttctttgccattctcttcataaacgccgaggaagctgcggcaacccattggcgtcttaaatgaacctgtaactttaactacctgatcgtaattaagaatgtctgggtacatacgtttggtcgcgcattccaaagccagttgtttaatatcgtaatttggatcgccaaacttatagttcaggccgtcgcggatggcaaacaccagtttagggaacacggcggttttccggtttttacccaagccggcaatgcgattacgcaagattgcctgctggatcattcgggattcccaactggttcccagaccaaaaccgaaggtcacaaacggggtttgtccgttggcggtatgcagagtattcacttcgtattccagtgattggaaagcgtcgtgacactctttttcggtacgcgccatggcgtagcctttcgcatctggaattgcccattcttcggctatacgctggtgtttgttgtaactggcggtcacaaagggagccagaatttcatcaattcggttgatggttgtaccgccataaatatggctggcaacctgagcgatgatttgggcggtcaccgccgtcgcggtagaaattgattttggtggctcgatttcagcgttacccattttaaagccttgggtcagcatgccgtccaaatcgatcaacatacagttgaacattgggaagaaaggcgagtaatccagatcgtgataatgaatttcgccgcgttcgtgagccagcaccacatctcgcggtaaaatatgctgtttagcgtagtgtttcgccacaataccggcgagcagatcccgctgagtcggaatcactttactgtctttattggcgttttcgttgagcagcgccatattgctttgctctactaaaccacgaatttcctgattcaggcgaccgcgtaattctcgtgacacatcgcgatcgtggcggtattcaatataggcgcgcgccagctgtttataatcaccggccatcagctgattttcgaccgcgttttgaatttcgcggatatcgacctgcgtttggttttccattttttgagcgaccacgcgggcgacggtggcacaataatccgcgtctaccacgccgacagccagagctgcacgctccacggcttctttaatgcgcacctcgtcaaaaggtacctgacaaccgtcccgcttaatcactactggtttcacgatgtgactcctgtttcccgttatgcagggttatccacaaggcaatcccacagctggaaagggctgcggaggaatgtggatgacactgtggataactactatatataggtgttttgcttttgatagacactatatatgggtttaatcggaagtgacagccaacttatttgacttaggacaaggaaatattctttaggtttattccctgtacagtcgatcacaaatttgaaatttttagtggattttttgtcgaatcgcgaaaatgctctagcagaaaatcgacccaaacccgcacacggggaggcagatttgccgaagcataatacagccatagcggaacggaggctggccagtgtttctccaataccggttgtaaacgaccagcagagaaatgggcggcagtgtgccactttgccagataggcaatacccatattcgccagagtggcatccagcatcatggcgggctgagaaacgatcaaacgtccggcgggttcaacgaatttgacgcggtgatcttgttgtaattgccattttactacgcggccggttgctggattgcgatgcaacagcgccagatgctgatataaatcttctatggtttgcggcgttccattctcggcaagataatcgggagaggcggccagcaccatttgcaccggagagaactcgcgggcaatcaagcggctgtcgggatcgttacgattaccaatggccacatcaaacccttcccccaccaggttaaccactctggcatccagcgaaatatctaaatcgatttgcggataacgggctaaaaaagtcggaatcagcggcataagcagctggtgggcaaatccggggatcacgctaatacgtacggtgccgctgggctgctgttcctgactttggacactttccagcgcggtggataatgcttgccacagtggcgctacgcgggcgagcatcgcttcgccttcatcggttagtactacgttatgggtattgcgttgaaacagcctgacgccaagttttgcttccagtacgcgaacgtttttactgatagccgcaggcgtgacccctagcttgcgggctgcggcggagaaattatcgctttgagcggcgctgagaaaggcggggagtaaacgatggagatccgaaggcagcgacataatggttgatacctttagtttaaattgatgttgccgattacagactacaccaacatggggagaaatgaaaaaatgacgtaataaaaccgcagaaggaatcattatgtctcgtattttagtattagcggcacaccgtaatccggatgagtctcgtatcaaccgtcagttgattgacgctttgcgtccgctgccgaatgtcaccgttcacgagctgattcgtgcttatccagattttaagattgatgtcgctcgtgagcaggcgttattggatgcgcacgatgttgtggtgatgatgtttccattttactggtacagctcgccggcgattttaagcgaatggcaggatgcggtattaacttacggtttcgcctatggcagtgagggcacgcggctgcaaggtaaaccgctgaaattggtggtttcgaccggtagccgagctcaggattatagcgctaatggatacaatcgctatccgattgaaaacctattgttacctttccacgctacggccaatctgaccgggatggatttcctgccaccgtttttgattcagggcacgagcaatataagtgatgaaaagttggtgatgaaaatcgaagaagcggtgaaggtcataaaggggatggagtagggttgggttgtttgtaaggaagggtttttgattgttttttaatctcagaatcagcgctgagttttccaaagtcaaaattggatcaggtttcgcaagccgaatagttcggtttctcctcactcgccgtggaggcttccgagcagggttggccgtcgccgcaaccctgcacccgcgtttggcgcgaaaacggggttctgcgaacgtcccctcgtgcactctttgtccggcgagccagtgctagattggcttgcgggcgttatcaggatgccatccctcctgtcgctgcggctcaaggtgcactttgaaccgctgacgaccgttcactcttggcctcatcccagcgcggcccacttcctgattgcgtcttagtaaaatcaaaaccattttttctgaatcacaattcgccttttgctttggatatcgcttttggtccagatcttgacttggacctttaagagcatatcttggccggcgtgatgaacgaggtgtcctgcgaagcgggtagacaatgcaggcagacaatgttgtgcggaggtgcggattgttgaggctcgcgcctatgagccttaactcggttgaggctgtggaggtgaaaaatttaccaagcgaatatcaaccgaaacccgatccgatttcagatttgaactgattttgactttaaagcacatatttcagtgaccgaagtttggaattggatcgggtttccattcagagagtaaccaataacacctcaaccaaatgaatgctccgcaagctccaaatctcggcgtgaatactctcgtacaatgtgacctttttccatcagcgcggctcgttcggacatatgcgctactacgtcgttgtcgtggctcactaacaggtaagtcatgccgtgttcccgtttcagcttattgagcagatttaaaatctccgcctgtaccgacatatccaacgcggaagtgggttcatccaatagcaacaatttaggccgtaacagtaatgcgcgggcgatggcgattctctggcgttggccgccggagaactgatgtgggtagcgatgcaccgcagaggcgggcaatcccacttgctccaacgcttcgccgatgcgttgctgaatgttcttctcgccgtgaactttcagcggctcccctaaagtacgctggatactgtgctgcgggtgcagcgaagcgtagggatcctgaaacaccatctgtacatctttacgtaactgaccggtaaaacgctggctggggcgtaacggttgaccaagcaaagaaatctcgccctgccactcgcgttgcaaacccgccaacgtacgcaaaaccgtagattttccgcagccggatgcgccgattaggctgaaagtctcgccggcttcaacctgaaaacttacggactctacggcggtttttacctgattcccctgcgggaaacggacccgtagctggctaacttcaatcagtgccattctgacctccgaacatatccgcctgacgatccaacactggtaaatcagtgccgaaagtgctggcatttgggcgacaggcccacagcgtatgagtatagggatgagtggaataaggcaaatctgccgccagaccttgatcgaccagcttgccctgatacatcaccaacacgcgatcgcaatgctcagtgaccaaaggcaaatcatggctgattagcagcaggctcatgttgcgctgctcggtttgctcgacgataagctccagaatctggttgcgtagtttggcatctagcgcagaagttggctcatcggcaatcaatactcgcggattattcactaacgcgatggcaagcattgcccgttggcccatcccaccggaaagctgagcaggatagtgatgatagtggtcttcagttaatcccaccgatgccaacgcattcagtacacgctcatgggtgtctgcgcgggtcaggctgttatgtaacagcaaggattcttcaacctgtttgccaatggttcgcaccggatttaatgcgtaacgcgggtcctgcaataccatcgcaatatcattcccgcgtagtttgctccatcgacgtggttttaacgtcagcaaattctgttggatcggattctgcgcatcctctggattttcagcgtaataacacaaccgatcggcgctcactttgcccggctggcgcactaatcccatcagagaacgcgcggtaatcgatttaccggagccggattcccctaccagcgccacgcgctcgcggccaagctggaaggagattttatccacgacccgctgctggtggaaatcaatgctgaggtttttcacctccaaacgcagatcagtcatgatgagggtccagtaagtctcgcaggccatcgcctaacaggttgaaagccatgctgctgagcaaaatcgcgcagcccggaatggcggcaatccaccattggtcgaatatcacctgcataccttcggccaccatcgaaccccattcagccatcggaggacgagcccccagacctaggaaccccaaacctgcggctgcgaggataattccggccagatccagcgccagtcgaaccaccgccgagggcaggcacataggtaaaatgtgtccccaaagcagacgtatgcccttgatacccatcatttccgctgctgccagatagtcacttttacgcagtagctgaatctctgcccgtgcctgacgagcgtaggctggccaggtcgtcagagccagtgccaatgcgccattcagcaaaccggggccaagcatggcgacaaaggcaaaggccaaaatcagacgtggcatcgacatcacgacgtcagtgatgcgcattaaaaccttctccaaccagccgccgtgataaccggaaagcacgccgactaacaatcccagcggcaaagtgatcaccgtgactaaaagcactaagcccagcgttgggcgcgtaccataaatcacgcgcgacagcatatcgcgaccgtagctgtcagtacctaaccagtggccgggttccggtggcagcaaccgttcggcggcgttttgccaattcgggttatgcggtgcaagccaaggagcaaaaatggcaatcagcactaacagggagagaataaacagcccaatgctggcggaaggagagcttttcagcgcacgaaaaaatttcattatcgacatatcagcgcgatctcggatctaacagctgaaccagcaggtccgtcagattattaatcagaataaagcacatccccagtagcagcgtgccgcccataatcgcagtggtatctccggcaaatagcgcactggtgagatagcgcccaatgcccggccaggcaaagaccgtttctgtcagcactgcgccttccagcatgccggtgtacacgagtgcgatgacggtaagcagcgtgccgcgaatattcggtaagacgtgcatcagcaggatacgtatttcgccagcgcctttggctcgcgcaagggtgacgtattctttattcagctcgctcaggcaggcagagcgcgtcagccgggtaatactggccagcgcatagtaagacaacaacgccaccggcagaaccaaatgggctgcggcattagcgaaagcgccgctgtcgccggaacgccaggtatcaatcagtgcgaaaccggttttggcttctaccgtgtattggtaaatatcatccagacgaccggggccggggctccactgtagcttggcgtaaaacagcaatagcatcagcaaccctagccaaaagattggtactgagttgcccagcagggtgaagaaacgaatgagggaatcgactttactcccggcccagcgcgcgcagattaatcccagcaatacgccgagagacgccccgataatcagtgataacgtcgctaactccagcgtagcgggaaatgcggtcagtaaatcctgcaataccggctgcccgctggaactggcaacgcccagacagccatgagccagttggaccagataatgccaaaactgcaccggcagcggttgatccagtccaagctgctgcctaacctgttgataagtcgcctgactggcatgatcgccgacgatttgcagcacgcgatccaccggcgacagcgctgacaacaggaaagtaatcagcaacaggccgaatagggtcagggcgaggctgaagatccctttgatcagcgcccaaaaacgacgccggggcaaggctcccggcgtattatttaaagctacggacatgtggctatctgctcgcttgtattaaaagttatcccaaccgggtacgcgggtacctatttgctgacaaggtcgtaataaaccatatcggcattcaacccttgttgatagcctttcacattatcccgtaacacaatttgcgttttggcctgatcgataaagatataaggcgaattttgcagaagttcctgctgtagcttggtataaagctggatgcgcttggcggggtcggcttcggcaacggcggcaagcgtttgtttattcaacccaggaattgcccaaccgtttaaaccggcgacggtgctgcttttgccatcgttataggcaaaagcgctagcgttggaatgagcgtcaaaatagtctggaatccacaggcgaatcgcagactgatgctgtttggcgcgaacccggccataaacctgactaccggcggctggcagcagtactaatttaacgccgccctgagcgaagctggcctgtaaagattgggcgatggtgataaacggcggtttattttccacatccagcgtcagagtcgcgtttttaataccggctttctgtagcaaggctttggctttggcaggatcgaaagtaaacggcgtttcttccagcgcacccggcaaaccgaccggcaggaagctttgatgcacaaaatactgtcccttcagcaaatctttggtaatgccttggtaatccaccagatagcgagctgcttgccagaattctggcttgcttaacattgggttagctggattagcggtgttaaagactagatagttttgttcggccgacgggatttcgaccactttaacgccagcctgagttttcagcgcggcggtctgatccggccccagttcccgagcgatatcggcatcgccctgttgaatcaggaggcggcgagcgcttggatcgggaacgttcttgataataatgttttttatcagcggcttattgcccggcgaggttgggttggcgtctaacacaatggcctgatgaggttggtaaacccgcattttgaacgggccgctgccggcagaatgcattttcagccaggcgttaccgaaatcaccgtctttttcatggggagccaccgccgctttatccacgatagaggcaataggcgtagacagaatattcagcgctaccgctgggctgacatcggcgctccagcttagttgtagggtattgttatcaatcttcttcaaatgcttatcgatattgtccggctcccagccgagaacgttcaggataaaggccggtgaacggttcatttttaccgcgcgagtaaaggaataaataacatcgtcggcgcgcacaggattaccggaagcaaaagttgcggcggggcgcagttttaccgtcagggttttattggcggcgtcaccttgccagctttccgccaaaacagggatcactttggccggattttcccgatcggcctgcatcaggcgctgatacaaacttgggacggtctgaatgctggataattcgttactttctgcggggtcgaggctgacaatatcatccagtgactggaccaccaccaaggtatccggcggtgtcgcggcctgaacgctggcagacaaagttgccgcaaccagcaacgacagaattcttgctttcattaaaacactccccgaatagacagatagtctcagccagacagaacgatgaggtaaataaattatttttaaattatttaatcgcatcgcacgatagaagctttgctgtctgtgggcaaagtctcaagggttatttcatataactatctagactatagacggagtttcggatctataaaccgatgtatttatcgtcggtggacgttaaataaccctgaaatcttgatgtgtgttagctttcgagaatcatgatttgattataatgaaacaatatttcactataattcgagtatctaaaaaatgattactgggaatatccatcatctcgatttactcccttattttccccaaccgttgcgtgctgccattgaatatgtaaagcagcatatcaacgcagaaactccgctgggtaagcatgatattgatggcaacaatctgtttgtactggtttccaacgactgtaccgattggcaggaaaatcgtcgggcggaatatcacgctaaatatctggatatacagattgttctggcgggtcaggaaggtatggcttttagcaacctcccagcgggagaaacggaaaccgattggctggccgataaagatattgcttttttaccggtaggaataagtgcacaaaatgaaaaaatgatcttgatgcagcccagtgattttatcgtgttctatccgggagaagtacataagccgttgtgcgcggtgggggaaaaggcacatgtaagaaaggcggtggtgaagatgaacgcaagtttgttgctttagtctggttgggtgtttgataggggcgatttatttcagtggtgaattgagccgtagccacttcaatctaattaaagcaccttctggacgggttttaataatccgccgtccttggcggattatgctgaatagcgtaaatacttaatccgcggagagtgttgctaccatcacggctttaatcgtatgtaaccggttttccgcctgatcaaacacaatactgtgtgcagattcgaacacttcttcggtcacttccatacctcctggcatagtgtattgctcggctaattgcttgcccagtgtggtttggtcatcatggaaagccggcagacagtgcaggaatttgacctgcggattgccggtcagcttaaccacgttcatattgacctgataaggcttgagcaaagcaactcgctcgttccatacctcctttggctcgcccatggagacccagacatcggtatagaggaaatcagcgcctttcacgccttcggctatatcttcagtcagagtgatttttccgccggttttctgcgcctgcgcctgacaggccgcgaccagtttagcatccggccagcaggcttttggtgccaccagccgtaaatccattccaaccaacgcagcggcttccaacatggagttgcccatattgttacgagcatcacccaaataggcgaaagtcatttcttgcagactcttttttggcaaatgttcctgcatagtcagtaaatcagccagcaattgagtcggatggaattcgtcggttaagccattccataccgggacgccggcaaactcagctagcgtctcaacgacctgctgcccgaaaccacgatactgaataccgtcatacatccggcctaacacccgagctgtatctttaattgattctttatgcccaatctggctaccgccaggcccgaggtaagtgacgcgagcaccttggtcatatgcggcaacttcgaaagagcatcgggtacgagttgagtctttttcgaagatgagcgcgatattcttacctgccagtttttgtttctctgtgcctgatttttttgcctttttcaattctgcagccaaatcaagcagtgtggtaatctcggcgggggtaaaatccagtaacctcaaaaagtgacgtttgtagaactgactcatagcgctcatctccatgcattccgaatagtctaattgaatttaaattcaacttatacgtataaatattcaattgcaactacaaaagataaatctttctcgtttatagtggaggcattggcggcggtgtgggaaaatagggctatataacgcccattgactgaggataaaggcatggcaaaccgcgaaaaactggatgagcaacgtgatgagacccgcctgatcatcgaagaattactggaagatggcagcgatcctgacgcgctgtacaccattgaacaccatctttcttctgaaaagtttgaagtgctggagaaagcggcggttgaagctttcaaactgggttacgaagtgactgatgcagaagagctggaagttgaagatggctccgttgtgatgtgctgtgatgtgatcagtgaagtggctttaaacgccgaactgattgattctcaggtagaacagttggttgcattggctgaaagctgtggcgtgaactacgacggttggggaacttattatgaagacccgaacggtgaagatgacgaagacggcgagtacgatgacgaagaactgattgatgaagatgacgacggtaaacgtcattaatctgccgctttgagttttatctaataaacccgcgctgttgatagcgcgggtttttttattctatgaataagtgacttaattacattaaatcgagagactacaacattttcaacatagtcacttcgcaatccacatgaccagtcgcacccattggcccgtcgatgtgttcgaagcctaatttttcatataaggcgacggcgctggtcaggctggcggttgtttccagataacagcggctaaaatcatgctgacgagcaaattccagcgcctgtaatgccagttgtttcgccagacctttcccacgtagaaccggcaagaaatacattttttgcaattcgcaaacatcggcttcgccacatgacaaaggcgctacgccaccgccaccggcaatacggccatcgacctcgataacccaataagcgctacgtggttggctatatagctcatgcaaatgctccagatttggatcggagacggtataacctttatccgccgtcaggccgaattcggcagaaacatcgcggataacgttggcaatggcaaggttgtcttctgccacgataggacgaaccagaagtcgcaagggagtggctgtggtcatggcatagttactcagcaaaaataggtggaaaggcgtgctctgaggacaggtgcccagcagtgtgtactgaccagcgagtctgtagtgctctgtaataccatcgaataccgcagtaatgcaactatgcccttcgtacttggcgctgcaggggtgttggctgcgtccactcacccgaatcacttactgatgtaagctcatcgggattcgttcactggccgcctacctgcaaccccaattacttgggcataaacgttatatattgggcgctgaaggggtgttggctgcgtccactcacccgaatcacttactgatgtaagctcatcgggattcgttcactggccgcctacctgcaaccccaattacttgggcataaacgttatatattgggcgctgcaggggtgttggctgcgtccactcacccgaatcacttactgatgtaagctcatcgggattcgttcactggccgcctacctgcaaccccaattacttgggtataaacgttatatattgggcgctgcaggggtgttggctgcgtccactcacccgaatcacttactgatgtaagctcatcgggattcgttcactggccgcctacctgcaaccccaattactcgggcataaacgttatatattgggcatagagatttataacgaatggcatagaagtattcgctgttttcactataaaactaaagccgcagggatgagctgcggcttcagatttttgggatataaatatcccgcagttcaagctgggtgaagctcagactactttacagcgccgcgatagtggcctgctgctcaatcagttttactttcgcttcggcacaggcagccagtctctcacgctctttagcaacaacggcttctggcgctcgtgccacaaaaccttcgttacccagtttgctttcgatacgctcgatttcaacatcaagcttggccacttcttttgccagacggtccagctctacggctttgtcgatcagaccggccattggaatcagcacttctgcgccttcaaccagcttagtcacggacaatggccctttatccccttcaggtaacagggtgatagaggaaagacgcgccaacgactggataaagctctggttttccagcactcggcgctgagcttcagcgctggcgccgcgtagcaacacttccagtggtttacccggagaaatattcatttctgcacgaatattacgcaccgcaataatggtctgcttgatccattccaaatcgctcagggctttttcatcaacctggctggcgtcatattctgggaaaggttgcagcataatggtgtctgcggtaatgcccttcagcgttttcacgcgttgccagatggtttccgtgatgtaaggaatgattggatgcgccagacgcagcagagcttccagcacgttaattagcgtgttacgcgtgccgcgcagctccgcctcagaaccgttgctcattaccggtttggtcagttccagataccagtcgcagaattggttccaggtgaattcatacagaatacccgcagccaaatcgaaacgataagtatccatcgcttcacggtaggctttcaccgtctggttgaattcagccagaatccagcggtcagccagtgacagcaccatttcgccgccgtgttggccgcaatcctgatcttcggtgttcatcaacacgaagcggctagcgttccacagcttgttacagaagttacgataaccttccagacgcttcatatcccagttaatgtcgcgaccggttgaggccagcgccgccagggtgaaacgcagggcgtcggtaccgtgcggctcaatgccgttcgggaattgtttttcggtacgcttgcggattttctcagccaactgcggctgcatcatgttaccggtgcgtttttccagtaattcttccagcgagataccgtcaaccatatccaatggatcgataacgttacctttggacttggacattttctgcccttcgtcatcgcggatcaaacctgtcatgtagacggttttgaacggtacctgcggcttgccgttttcatctttcataaagtgcatggtcagcatgatcatgcgggcaatccagaagaaaataatgtcgaagccgctgacgataacgctggtcggatggaaggttttcagcgcatcggtctgctctggccaacccagagtagagaaggtccacagaccggaggagaaccaggtatccagtacgtcttcgtcctgacgcagagcaacgtctgcacccagattgttctcgcgacgcacttccgcttcatcgcggcctacgtacactttgccagcttcgtcgtaccaggctggaatgcggtgaccccaccacagctgacgggaaatacaccagtcctgaatgtcacgcatccaagagtagtacatgttttcatactgcttaggtacgaactggatatcgccgttttcaaccgcttcaatcgcgactttcgccagcggagcagtacggacataccattggtcggtcagcattggctcgataaccacgccgccacggtcgccgtaaggaacggtcagatcgtgaggtttgatttcttccagcagacccagtttgtcgaactcggcaacgacggctttacgagcggcaaagcgctccatgccttggaacggttctggaatcgcaccgctgtatacatcggtgacttcaccgttggtgtcgaatacttcggcttcgctacggatatcaccgtcgaaagttagaatattgatcatcggcagggcgtgacgtttaccgacttcatagtcattaaagtcatgggctggggtgattttcacacagccggtgcctttttccatatcggcgtgttcatcgccgaggatcggaatgcgacgacctaccagcggcaggatcacttctttaccaatcagatccttgtagcgcggatcttctgggttaacggcgatgccggtatcaccaaacatggtttccggacgggtcgtggcaacaaccagatagtctttgccttctgcggttttcgcgccgtcggccagcgggtaacgcaggtgccacatggaacctttggattcgcggttttccacttccagatcggagatcgcggtgcgcagttttggatcccagttcaccaggcgtttaccgcggtagattagatcttctttgtgcagacggacgaacacttctttgaccgcgttggacaggccatcgtccatggtgaagcgctcgcgctcccaatccacggagttgcccaaacggcgcatctgacgagtgatggtgccgcctgattcgcctttccactgccagattttgtcgatgaaggcgtcgcgaccgtaatcgtggcgagttttgccttcttcagcagcaattttgcgttctacaaccatctgggtcgcgatacctgcgtggtcagtgccggcctgccacagggtatttttcccctgcatgcgctggtagcggatcagcgtatccataatggtttgctggaaagcatgacccatatgcaggctgccggttacgttcggcggcgggatcatgatgcagtagctttctttgctggtatcgccgttcggcttaaagtaaccctgcttttcccagtgttcgtagagcggttgctcaatctcgtgcggactgtacgtcttgtcgagggagttgtttgttttttccattttatttatttgttcagtgagttggcggcgttgccgtggtcaaatggaagccgacgctgcgatatgacttatatcggtcgcgcgccaactgtttcaaagtttcttcgtaaggaacgaagtctatcacttcatggaaagcggtggcaaaacctgcgaactccggtagcaggctaatcagcaggtcgcgcggtgaatttccacgtctctccggccaggccagctccaccggtgcgccgtactttggcccttcgcccgctaaattatgcggaacaaattgctccggcgctcgttgccacagggcctcgtcaagacgttgagcctgttcctgactttcacatgcgatcagcacccgtttgcccgcccgccagcgttcagccgccagatcgcatgccagcgcctcatgggctcgcagctcgccggaaggttgatcgtgatcgagaagatagaaggttgcgtttttcataggctctctacgacgttaagggcacgaagtgtgcccttaagataactcggtgtatacccttgtctctgaagtaacagggggattctctgttacttcaatgagttcgggtagatatcaaacgattaatcgtcgccgttcagacctgcgcgattcaacaggaactgcgacaacatggcaaccggacgaccggtagcgcctttgttttttcctgaacgccatgcggtacccgcaatatccaggtgagcccaagtatatttacgagtaaagcgcgacaggaagcagcccgcagtgatagctccgccagcgcgtccgccaatgttcgccatatcggcaaaattggagtccaactgttcgtagtactcatcgcttagcggcaagcgccacgcgcggtcaccggcttgttctgaggcgccaatcagctcgtgagctaatggattatggttcgacatcaaaccggtaatgtggtgacccaaagccaccacgcatgcgccggtcagggtggcaatatcaatcaccagctctggttcgaagcgttcaacgtaggtcagagtatcacacagtactaaacggccttccgcatcggtattcagcacttctaccgtctggccggacatagtcgttaacacgtcccccgggcgataagcctgcccgcccggcatgttttcacagcccgccagcacgccgataacgttcagtggcaattgcagctctgccactacgcgcatcacgccatacacggtggcggcgccacacatgtcgtatttcatttcgtccatgccttcggctggcttgatagaaataccaccggaatcgaaggtcagccctttgccaaccagcacaattggcttagcgtcagcattcggattacctttatattcaatcaccgacatcagggattcgttcttagaaccttgccccacggccagataggaatgcatgcccagttctttcatctgttgctcaccgataacgcgggtgatgatgttagtgctgaacgcatcggctaactgacgagcctgagaggccaggtaagcggcgttacagatatttggcggcatattacccaggtcttttgccgctttgataccggaagccacagccaaaccgtgctgaattgcgcgctctccgctggtcagttcgcggcgggttggcacgttgaataccattttacgcagcggacggcgcggctcgactttattgcttttgagctgatcgaaggtgtaaagggtttcttttgccgtttctaccgcctgacgtactttccagtaggtattacggcctttgacgtgcagttccgtcaggaagcaaacggcttccatcgaaccggtatcgttaagggtattgatggtgttttgaatcacttgcttatattggcgttcatcgagctcacgctctttaccacagccaattaacaggatccgctcggagagaatattaggcacatggtgcagcagtaatgtctgacccactttgccttcaagctcaccgcggcgcaacaaagcgctgatgtagccatcactaattttgtcgagttgttcggcgatcggggatagacggcgaggttcaaaaacgccgactacaatacaggcactgcgctgtttttccgggctgccgctctttacactgaactccatgcactctcctgaatcttaaagacaaaggcgggagctaccgctagaatgtagcgctccgcaacgatctctctccgttgtgttaacgacgtgtgttaacctgaacggcataagttgttttgttttggcgactataagcatgttcctataggacacctaaacgctagatgctgtaatactattttagctgtgaaggttgccatatgatgagaataaatggcggattagcgatgaaactatcgattttcctgcaaaaagacaagttttcacaggcgtattagcgtgatcatcattagatatctggtacgggaaacactcaaaagtcaaattgcgattctattcatcctgctactgatcttcttcagtcagaagttagtacgggtattaggtgccgcagttgacggtgagattccgacaaatttggttttatccctccttggactcggcgtgccggaaatggcgcagcttattctgccgttgagcctattcctcggcctgttgatgacctacggcaaactgtatacggacagcgaaatcaccgttatgcacgcctgtgggttaggcaaacggtctttgattgccgccgcattaatcttatcgatgctaacttgtggtctggctgcgattaacgccatttggctcgggccgtggtcgtcaaagcatcaggatgaagtcttgaatgatgctcgggcaaacccaagcctggcagcgctggttgaaggccagttccaatcctcgcaggatggtaacgcggtgctgttcgtcagcagagttagcggtaaagaattccagcgcgtgttcctcgcacagctacgcccaactggcaatcagcgtccatccgtagtggtggccgacagtggccacatgatggagcgccctgacggttcgcagatggtattgctgaataaaggtactcgctacgaaggcaccgcgctgctgcgtgatttccggattaccgactttaatgattatcaggcggtcattggccatcaaaccgctcagcagaacaataatattgcggaacagatgtcaatgagcgccctgtggcattctaccgatcctgacgcgcgcgccgagttccactggcggctaacgctgattgtttccgtggttatcatggcattgctggttgttccgctcagcgttgtcaatccacggcaggggcgtgtgctcagtatgctgccggctatgttgttgtatctgattttcttcctgctgcaaagctctctgcgctccaatgcgggtaaaggaaaactggatccgttgatttggctatgggcagtgaacttcgcttatctggcgctcgcgctgatccttaatgtgtgggatagcttgccagctcgtaaattacgagcgcgtttgagaggggctgcctgatgtttggcgtattagaccgttatatcggacgaaccatcctcaacaccatcctgatgacgctatttatgctggtgtcgctatcgggcatcatcaagtttgtcgatcagctgcgcaaagttgggcagggggagtattcggcggctgcggcggggatgtataccttgctcagcgtgcctaaagatattgaaatcttcttcccgatggcggcgttacttggcgctttgctcggtctgggaactttggctacgcgcagtgaactggtggttatgcaggcttccggtttcacccgtatgcaaattgccgctgcggtgatgaaaaccgcgattccgctggtattgctgaccatggcaatcggtgagtgggttgcgccgcagggtgagcaaatggcgcgtaactatcgggcgcagatgatgtttggcggttcattgctctcgactaaaaccgggctatgggccaaagacggttcggactttatttacattcagcgcgttgtgggcgaaaaagagctggccggtgtgaatatctatcattttgatgatgccgatcgcctgcaatccgtgcgctatgccgcaacggcgacttttgaggataaaatctggaagctgtcgcaggtggatgaatccaatctgagcgacccgaaacaaatcaccggtgctcaaacgctgacaggggaatggagaaccaacctgacgccagacaagctgggtgtggttgccatgagtccagattcgctctctattagtggattacataattacatcaagtacctgaaacagagtgggcaagaatccagccgttaccagcttaatatgtggagcaaaatttttgcgcctatatccgtagcggtaatgatgttgatggccttatcgttcatatttggcccgctacgcagcgtaccaatgggggtgcgagtggtcactggtatttgcttcggctttattttttacgtgctggatcaaatcttcgggccgcttagcctggtttacaagattcctccggtgctgggtgctttgttgccgagtatgcttttcctgctgatcagcgtttatatgctgttaaaacgtcgatagcggcgtttttttcaacacttgaactaaaggcagtgtaataacagttgcatgcggatcacaggtaagtataattcacctcgttctccgcatactacttcagtgccgaagtggcgaaatcggtagacgcagttgattcaaaatcaaccgccgcgaggcatgccggttcgattccggccttcggcaccattagtatgaaaatcaagtcaccgcaaggtggcttttttttttgcctaaaatccagttcccgcatagctttccctctcttttcagtcaacctgattcaatctacatcaagttactgatgtgggaacatttgcgagtaatcccgcttagataatgtttgtccccacacagagcccttgaaaggatactcatcatggctttgagtgatgtgaaggttcgtacggctaagcctgaagcaaaagcctataagctgactgatggcgacggcatggtattgctggttcactccaacggttcaaaatattggcggcttcgttatcgctttggcggtaaagaaaagatgctggcgctgggaaaataccctgaagtatcgctggctgatgccagggcgtggcgggatgaggcggggatgaatagcgcaaaagggtagtagcgaggtagggtgatttctaaggccgcttcttttgtcattgtcagtttttagctgttttcgagttaattaaaagagcaagaaaatttaaatttaccttaagtttaatttatttctgaagttggatggcgtgattttttgatgttccatacaggcagatatgagaaaggtttctagcgaggtttttttaatcttattcttgactattttgctattttttaaatttagaataatagcttttagattgatttattcgtcttgtagggattttcctacagcgttatgagaaaattcatatatcagatgtaggatatttcatttattattatacgccatttcatttttattggttttgatcaaataagatatatcgctattaaattaaaaacatttagcacttaagtatgacaatctttactttatggatacgaaacaccatatttaactgtgttttgcaggataaatatctatttaatttaactaaaacgatcttttaatcggaaaaatcacaatttactagataaaaagatcgtgtatagttcgttcgtgttgttcggggtgaaatttaaggaaagttgataattcagagtatttagaaaaatctgttaactatgacatatagtgtaggcataaagaaagtcataagatgggtatcttcttaattatcctctatttgtctgcctataaaaaaatattatcggttttgctattctgtctttttagaaggtttgtaccttttaataattattttgttttcttatttaatttttaatggctattcaattgcggtgttttcagctaagaatttgaatttatcgcacaatcatatctgtataaaaatattatctaatcaaaggtctttattatgtctaatttcaagagaagtgtattggctacagcatttatttcttctgcgtttatttctcaggcatttgctgccgatgaaggtaatgggcgagtccattttactggtacagtaattaatgctccttgttcgattgcgccaaattctaccgatattaatgtcgatttgggacaggtatcaaataaggtgctggaaactggcaataaacattccgagaacgttagctataacatcgatttgcaagattgcgatctgagtgagcaaacggctggttcagtaacttatccggcaatgtctaaagttagcgtgaccttcggtggggtttccgatgcctctgctgtggctttgctggctaacaccggtagcgcgactggcgcgggtatccgcctgatcgatgctaatggcgcattactaaaagttggcgataccagcgctgatatcaatctgatctccggtattaaccaaattgcttttgcagctcgtgttgaggcaactggtacagcagtgaaggccggtactattgtttctcaggctacctacgcactgaactataaataatctctttttttatcacgtcgatttaaggggaggcaactcccctttgttcatttgtgccaaaaaagaaacgctctaaatcgatataaataattatttatacgccataagacagtgatttatttatgcagagtaattctaaaagaaaagcaatgatctttcgaatgatgccaatattatcgttggcaggcataggtttattcctgcctgagtgtgctacggcggtagaatttaataccaatattattgacgctcaagaccgtaataatattgatctttctcgatttgaaattaatgactatacgccaccaggtgattatcttctggatattatggtcaatggcaggttattacctgattcatctctgattacctatttgcctattgatgaagggaggtcaagtaaggcttgtttaacgcctgaattggtcaattctttaggtcttgctccagcagtgcgtaattcaatggggttatgggataacggtcgatgcgtttctatcgatgataaacaagaaataacggaaagttacgataaagaaaaacagcatttgattatttctattccgcaagcctggctagcgtacagcgatccaaattgggttccgccatcgcaatggggtgatggcgtacccggcgctttgctggattacaacctgtttgggaactattacgcacctaattcagggaggagtacgacaaatatcagcagctacggtaccgcaggcgccaatatggggtcttggcgtattagggccgactaccaatatattaatagtgacaatgaaggtacgcattacagtaattttgactggtcgcaggtttatgcttttcgtgctatttcgtcgataggtgccaaatttgtcggtgggcagacgtacctcagctccagtatttttgattcttttcgttttttgggggcttccctcgcgactgatgagcggatgttgccacctacgctgcgtggctatgcgccacaagttatgggaattgcccgtaccaatgcgcgtgtcgttttgagccagaatggcagaaccctttatcagactaacgttgctccaggcccatttgttattcaagacattagtgaaacggtgcagggaaatattgatgtgagagtagaagaagaggatgggcataccacttcttttcaggtcagcgctgctagcgtgccatttttaactcgtaagggttcagtgcgttataagaccgctttggggcggccaatgcatggcagccataatgcgctgggcgatccgattttctttaacggggaattttcctggggagccttcgacgatatatcgctatatggtggcctgattgccacgtcgcaggattacacagcggttgcgatgggaatggggcaaaatttgcatgagtttggtgctttatccgttgatgcgactcactcacaagctcaattacctgagcaggaaaaactgagcggggaaagctatcggatcaactattccaaacgttttgatcagactaatagccaaatcacctttgccggataccgtttctccgaaaaaaactttatgagcatgaatcagtatttggatcggctgagtggcaataactatctacaaaatgacaaacagacttataccctgacggccaaccaatatctgacatggccggatgtcacgatgtatttatccgcgacgcataaaacctactggaatgatgtttccagtaataactatgggatttcgctcagcaagcttttggatattggtccgtttcagggcatttctgcggctgtttctgccaatagagtgaaatacgagaacgaaactgaaaaccagattttcttctcttttagtttgccaattggcgcagggcagaaaattagctatgacgcgcagcgagataagacgaacggctacacgcaaaatatttcttactttaatagccaggatgccaaaaatatctggcgtgtcagtgctggcggcggaaatcccgaattgcagaagggtgatggtgtatttcgcggcggttaccagcaccgttcgccttatggagaatttggtattgatggtagccataaaaataaccaatacaactcggtgaatgccaattggtatggctcattaacggcgactgcgcaaggcgtagccgcgcatcagaatccgtcgggtaatgaacccagactgatgattgataccggtaatatttctggagtgtctttcaatattaactctaccgtaactaacggttttggtttggccgttgccaatggagtgacaagctaccagcaatcggatgttcgggttgatatgcaaagtttgtctgatgatatcgaagtgtataacacagtgattcagaaaaccctgaccgaaggtgcgattggctaccgaaagattcgggtggtgagaggtcagcaactgatggcagtcattcgtttatccgacggtagttatccgccattgggttcttcggtagtagcagataaaaccggcgctgaaatcggaatagttggagagaacgggctggcttatctggccggattggaagaagcggcacagttaaccgtgcaatgggggaaaaatcagtgtcgtctgacattgccagagaataagggtatcaactccggaaaaattttactgccttgccagtaacccaatgattaattgaccttcagattgacctgaatggctcaggcaattgggcaatagagagtacagaactgacaaaatttaaagtgagtattaatgatgaatttagaaaaaaaaatgagacgtatgacggctagtcagtctaaaaacatgttggtggtgctggcgttaatgctgctcggcactatgaatagtcaggcggcaataaatttggaccggacacggattgttttcgatagtagcgataaatcggtcagcattattcttgaaaataagagtaaaacttccccttatctggctcagtcctggctggaagatgcgaaagggaaaaagattgagcgtcctctcgtcgccttgccgccgatgcaacgtattgatgcaggtcaaaaaagtcaggttcgtattatgaaattgcctgatgccagcacgcttgctacggatcgcgaaacgttattctattttaacgtgcgtgaagttccgccaaaaagtgaaatggctaacgtggttcagattgctattcagaatcgggtaaaactcttttatagaccaacggcgattaaagcggattataaagagtcctggcaggacaaacttcagcttactaaacaacgtgaaagtctgaaaatctataacccgacgccttattacgtgacgctgggatatttgagtcaggataatcgaggtaatttccccggttttgatagtgtgatgattgcgcctttcaatactgaaatcgtgaaaactccgggctatagcggagatcattatagcttgggatatatggatgattttggcggcttggtgttgcgcatatttaattgctcatcggttgagtgccagatccagcctgcggaaaagaataaataatgtttattgccgtttcgttaatggccaaggataaataatgattcctttttttctagctaaattgcgccgcttctatggctcgctggttcttttgagcgcaactttgttactggctccaacggcatatgcccttgattgtgtagaagcgggcaccggcatggttataaaaccggcaattccgattggtgcattggcaattccatccaatgtcgctgcaggaactaaggtctgggaatctaatgatattacggtgacggcttactgcgataatgtgctgggaagtgtccgggatcaagtatggttttattttaacccgttgaataacgcattaggtcagggtttgcagttaggcgtgagttatttaggtcaggagttagaaactaacggtaagggaataaataccaatacggcacctatcgttaaagggcagagcgtaaccgtgaccgtgaccttcagactttatattaaagtgacaggaaacccgccctccagcggcatttatcccggggctaatacttttacggttttccagttggatggctccaatgggcttaaccttactccagcagcgaagaatctaagatattctctatctggattaagttcgacgcgctttattgcctgcggtgcggatttagtggtttatccggaatcacaggtcgttagttttggttcgtttaataaatcgctgttatcaacgacgggaaatgggattagcgcgccatttgcaattacttcagtgaagcaaggctgtttgtccaacttttctattcaggcacagttttcaactaccaatccgttaattggtgataatgccatcgatatgcaaaatggttctaaattgaccatttatgatgacgctaatcaagcggtagtatttaaccgttatgctgattttgccgtgatgaatgatgtgaatcaggtaacgaaaaattataccgctagcctgaatgccattccggggcaagccataaaattggggcagtttgatgcgacggcaatagttaagattaactattactaggttgagacaggcaagtgaagactgaaaagatgcagccagacgaggctgcatttatggtgcacccagattaattgatcaggaatgatttaccttgctggagtactaaatcacaggctttagttttaattttttcagtgagttgggcagtgcccagattattgagatccagacttttaccttcgccggttttcagtaatccccccaggccttcctgatagtcctgacttttggcattttccgtactggtaatgcccaatttactcatcagctgatctttaattgccgaagtgccattggccgataaaacgttattttgaacgcagtattgcaaaatacctgcggcattcgtcatggtactcgcgctgagtgctttatcgccgccgttaagcagcccggtaagcgaagataatgatgaagagctatcccccgatttactgtactcgtccgctgcattttttaccgagtcgaataaactgttggcttgagcactaccggttaccagagtgctggaaaaggccaaagccagtaatagacgatgggtgttattcatagaaactcctgtttcacattgtgggctatagccaaaagcctgaagcactgaagcagttagatagaccgttagtcgttaacttcacgggcagcataacgtaaaaatataacttaggagagcgtgtgattttagctctactgcatatttacagatttagaatccgcatatcaggttgtccgaaagctgataacttatcgggttggataatagaaacacactgagaatcatcggaaatctacccctgagtgacacattatgggatgatcatgacaacaacataatttaggggacgttatggcttcgctgaaagatgtggctaatttggcttcggtatcattaatgactgtttctcgggcgattaataacccggagcaattgcggcctgaaacctatcagcgagtggcgcaggccatcgaagctcttaattatgtgcctgatttttctgcgcggaaaatgcgaggtaacaccacgaaaacctcgacgttaggagttttggctttcgatacggccacgacgccattttccgttgaaatgctgctttcgattgagctgacggcgcgagagtgcggctggaatagttttctggtgaaccaaacttcagcggaagacagtgaacgcgctgttaatcaactgctttcccagcgtccagatggcattatttttaccactatggggttacgcagtatccagatcccagcgcgcttaatggataaaaagttagtgcttgctaactgcgtgagcgacaattcggatgtggccagctatattccagacgatttttggggacaatatcaggcgataaaacgactgattgaacgtgggtatcgccgccctttgtgtttttatctgcctgaaaatacgctcgctgctcaggctcgtcgcgctggcgctgaaaaagcgtggcaggatgccggtctgcctttaagtgatttacgtcaggaacacatgatttggggggatgagcattacccggatgtcgttacactgctaaatgcacactgtcctaatggaaaactagattttgatattttggtttgcggcaatgatcgtatcgcttttctcgcttatcaggtgctattagccaaaggcattaaaatcccgcagcaagttggggtgctcggttatgacaatatggtcggtatcggtgggctatttttacctccgctgactacggtgcaattgccgcataatgaaatcggccgtgccgctgctttgcatttaatccaaggcagaacggacagcgaaattcataaaattccgtgtcctctgctagaaagatcctctctctgactttccaattaaaccgactgcggtgttcatccgcagccgtttaatcctaaatttttcaacctgtttttagcgtccagtattgcccactcgccagcaaggcctggccattatctgcaaaaagtgaaagctggcgcaggccttcacttggataaattcgactggtcaggctagcttcgccattatttacaaacacctctattgatgatttatcgataaatattctaaatgataagatgtcgccagcggggatttcgacgctgcgatagccggaaagacggtgctgcggataatggcgattgaggatcaaccgttgagcctggttgtcgataaagacagatacgccttcatctgcgccctcaattccccccaaacgtaggccgaagcgttcggcgttgctatcgttgagattccattgcaactggatttccagcgcgctggcctcgtcgactatttgtcgggtagcgttttccaatggcaacttttctaactctacgtgctggcgacgcagcgtttccagctcagatatgggctgcatccataacttcccattatccttaatacttaattctcgcggtaaagtcaggcaaccggcccaatattccgctttagaaggcatattggattcccacatatccatccatccaataacaattcggcgaccatcttttgctgtgaatgattgcggtgcataaaaatcatgtcccagatccagctcgacaaaaggttgggcacgatgaaagaccgtgccgggtcgccaggaaccgcgtaaataaccgctctggaaccgattccggaaacggtagccttcggcttttataccttgcggggaaaacattaaaacctgctcccctcccagagtgaagaagtccgggcactcccacatatagccctcgccggtatccgctttggctagaacctgttgaaaagtccattggtgcagcgtttcgccgcggtatagcaacacatgtccgcaatcgacatgatctcgcgcaccaatcaccatccaccaaacgccgtcttgtttccataccttgggatcgcgaaaatgcatgatgccgttcggtggagtcaggataacgccctgtttttcaaaattgattccatcttgactggttgctagacattgcacttcgcgaatagcgccatcatctcccggttgattgagccaaacgtgaccggtataaatcagggtcagcgtgccattatcatctaccgcgcagccgctgaaacagccgtctttatcccactcatcgcccggcgacagtgcgatcggctggtgttgccaattcaccatatcggtgctggtggcgtgcccccagtgcatgggcccccagttttcgtcatagggatgatgctggtaaaaggcgtgataaaggccgttatgataaatcagtccgttgggatcattcatccaacccgccggaggagccagatgataattggggtaaaaagcgtccccgacctgaggaattaattgttgcagcgcatggttagcgcgatccagttgcgttttcataatcattcacttggttgataagttaagagataagtgctggtttcggggatcagcgcgtagcaggaagcaggaaagcagagtcaggcccagcaccatgccgcccatgatcatgtaagttgcagcgaagccgcgtaggtcatagctatgtcccgccaatggcgacaacacgctggcgcaaacctgagtgacaaattggaaacccaccagatataaagtggcggagaggcgtggatcgaactggctggtgatgtatttgaacatggcgatcaataggatcggcagttcaacggcgtgtagcagtttcattagggaaatggtgacggcatcatcagctaatcctgaaccgataattcgcagcgacatgatcataccgcttagtagcagagcttgtttggcaccaatgcgattaaccaagaagggagccaaaaacatgccgcctgcttccaggaatacctgtagtgaattcagaaaaccgtacatttcattgccatggcgcggatctgaaaatagagaagagaaatagaccgggaattgttggtcataaacgttataaatactgacgcccataacaaatacgaccaaagcccaaaaacgtggcgttttaagcaggcctagagcatctgatagggttaatgcgctagatttgccatattccaactgattgagggcatcggttttaacttcccgaagacagagtaataacagcagaaagaccactgccgatgaggatgccatccaaaaattgatattaggattaatgttaaacagcattccggcaaagaaagtggcgcaggcccagcctaaagatccccacatgcgtgctttgccaaattcaaagccgacaatacggctaacgcgttcggtataggattccagtgcgccgatgcccgcgaagaaagtggctcctatatataatccgcccacaattgcgccagccagcatgttaagtcgcaataacggagcatagataaagatgaagaaggggccgctgagcagcaataagccgccaattgcccacaacagatttttccgtagccctaatttatcctgaataaagccgtatagcggttgggcgcataacgcagtgagcgcgatggctgaaaatgtagtgcccgtttctgcgccttttaaaccgacactttgatttaaccatatggaaaataaagagaatgccgaagaccaggtgaagaaaaaagtaaacagcagtccgctcaaaatcagatattggttacgaatgttgcctttcatagcagtaccctgatggctttgtatggcgctattgttaacgttaacttttcatcatgagaagctagcgtcttctttatttgcgatgttaatcacaaatgttaacgttaacattaatgggttgtgagctggataccataaattaattggtggacaagaaagcagaggaatacaggaaaaagagatgttgatttgttttggcgatgattattagcatattgatatgcaaaaacgattgccatagggtaaatggctgatatagcataattgcccttatcttttgttgcctaaaatggcgcatcccatgatgaatacgtcaaataagacacaatccctcgatgggcaacgttcagcctcattatcttcgtcaacacttcccgatgctgtccggaataaagaaagtgttcaacgtatcctggttatcaaactgcggcattttggtgatgttcttttaaccaccccgttgttaaatacgctgcgagaaaactatccgaatgcgttgatagatgtgctgctttatggtggaacagaagcgatgctggcggcaaatagcaccgttaatcatgcttatatcgtcgatcgagatttaaagcatgctggtctcaaggcacaaatttgtggcgaaaaagcgttgtttagcgatctgaaaaaacagcgatatgatctgatcctcaatttatccgatcaatggcgcgccggcgtttattgccgtttattacagcctaaattcagtatcggtattcgttttcctaaacgggataacgggctgtggcgctactgtcattcccgactggtggatattccgcgggcagaagaacagcatacggtattaaataatctggcgattcttgagccgcttgggattgagaatatcagtactcaagtcacgatggcattcagtcaggctaatatcgatcgggtcgttgagatccgccaacagaatcaacttgatagctatgtgctgattcaaccttctgcccgttggcgattcaagacatggtctgccagtcatttcagccaattgatcgattcactgactcagcaaggtcagaagatcttgctgaccgggggacgcgactccgccgagttggattatattgccgaaattattggcggctgcgcgcagcctgagaagattattaatctggcggggacgttggatttacctgaattagctgtattaattgatcaggcaaaactatttattggggtagattcggtagcgatgcatatggccgcagctctgcaaacgcccgccgtggtgctgtttggcccaagtaatctgcaacagtggtatccttggcaggcgccacatacattgatatgggcagggaactatcggacgcttcctcagccaaatgaaattgatacagatacaaccgagcgttatctggacgctattccggtgaatgaagtgaaaattgcggttgatgcctggcttaacggctcagatcattaatccatggccattcattctccccttaacccgtctgaattgagagtaccatgacgacaacattaagctctccggaggttcgctccccggaaatatctttggccaatcgcttaagcggtttactggccggctttgctgcttttctgctaggggtagctctgccgactgccacttctttcgtgaatattgcgttggttctgattattatttgtttgattattcagcgcgacaggctgcaattcaaagtgttggcaaccaacccaattgtttatttacccgcggtgatgttcttgctgctggcggcgtcattattattccatcataacgattacggttctgagatggtgggtaaaatgaagaagctgctgtatgtactaccgctggctttatttttcctgcatcagaatcgtttgattaagctatttggtgccggtttcctgctggcaaacgcggttatattggcaggttcactattggttggcgtattgcacgtaccgctaggcatgatcgacccggcgaatccgacgatatttaaactgcaaattacccaaaacttctttatggcattagcggcggtattgtggctgatgctggcgtttaaaagcagcggttggaagcgtttgggatatggcgttctggttgcaggtgcttgctatagcgtgctgtttttagtactgggtcgtaccggttatgtggctctggtcgtagggttaggatcttggctatttttctcattgggaaaccgccaacgtcttggtctggtggctttaggcattattgcatttgctattatcgcgctggttcctaaccgggcaactgatcgtattatgctgggcgttaatgaaattaaagcctgcatggcatcaacttccggcgatgaatatcaggcttgtaactcttctatggggcagcgttccgcctttgctatggaggctgcacgactgattaagcaggcacctattatgggcaacggtgcgggcggtttcttctattcgaatccggaaactggctataagatcaataacccgcataaccaatatctgctggaaactattcagtctggtattttgggcgtggtgatatttttggcctgggtagtgtgctgtttccgtgcagcctggcagcaggagccgaagttacgcaatctgctgctggcattactctgtagctatatggcctgtaatttctttaactccttcctgctagattattcagaaggccatctgttcatgatactggctgcgatactggcgggatattcggtatcagcgaagcaaaaaaggcctcagacgctataagttagccctggctgatcgacgataaaacggctctttattggagccgttttgcgttgtcgctctcctaacctatggctggcttctggcaacctgcaaacttgtctgagagggactcaatctgttttgtcgtggattctggcggtcaaaatagtcagatatgcactttatctgattagctcgtaactgcaagccaggggtaactgagcgcccgtttttagccgtaataaacccaattatatatttcccattcaaatcataaatctcagaatctagaaaccattttattctcattctactcagccacgttaaataacccggagcagcgttttttttcttattgggtaaataatcgccattatgggtacagcaccggattaactactctgttaataaggctgctcttagcaggcatagcgcacaggtttaattcaggcgtgggcagtatctggaatggcatactagaacgagtgccgaagtggcgctgtagctggatctgagaggtttgatgcggtgagtttgtagatgcaggtttgcatttatagtgcagaattttggtgagtagaataataacttggtagtatgaaatttgtactgtaaataagactgtttgatgacatatctgaagctaacggaattacattatattctgtctccgctgtctgtatatggattattttctcagaaaaaatagaggtttgatcagcttaaagtgtaatagttgagtagctttaggaaaatatagataattcattaaataatgctaataatttatacaaaataaacagtaaaaaaattaacaagccatcacgatctctatattatcggttttttatttgattttttgtgaataaaaaacaggtgaaaaataatttaatttacttttttctatcaagatggcgatatttaaatgaatgaatcatgactaagcattggtgatggatatattgataaataataattagtttgttttctgtacagccgagtgaaaatgaatttgtggaaaataaatactcattttttagtttatatattttaattagacgtttgcggtgggtttttatgctgcttgatttgcttttgaccgactccaatgttgtgagaatctaatgcatagaaaatgagtatttattatttataagtggataaatgtaacttaaagcacttaacatgataataacatgtgttattggtgtgcggtttttttcgaattaacagtcactatctgttataggaataatcctattattgcctgactctattcatttgctcttggcaatagaatgcttatgaatataggagttttaagcaggatgtttttatttttaaacactcataataagattgagtctgtagtgtggttatcactacatttttaacgttaaaacctcagggatagcaaggattaacaaaaatttattttccatggtttgttttttattaatttattgattttattgtatttttatcattttgctttaccgatctaactattaatcatagatggtgtaatacctaatatcaaggcggggtttatttgttttgaattggcagagttatctgattctttgtcattaaaatttaatgcgcggtgattataaggaaatcaaaacactgtggtgaaattggctaataaatttaatgtgatgcgtaattcgttgattgatagtaatcataaatcatgatgtggatcacttttggccatttgtaatatgtgtgataattttttcaatgatttacattttgaaaaatccagcctactttcgggatattacgcaatagttttaaatctgactatgataaagatgtatttctattcctgagctggttcaggttgattctgctgatcgcctaaacagaatctacatttattaacctatccaacgtcattgagagaatcatggcaaactcatcagcgaataaactatcgttacccgcactgacttctcttgtagttggttcgatgattggcgcgggtattttctccctgccagcgacattcggacgagcaacgggtggattcggcgccattattgcctggtgtatcgccggtggcggtatgttaatgctggctttcgtttttcaaacgttagcgcagcgcaaacctaatctggattccggcgtattcatttacgctaaagaaggttttggagattatctaggattcgcctcagccctgggtttttgggccggtacctgtattggtaatgtctcttattttgtgttgatcaaatctaccctaggcgcgtttttcccaatattcggtgacggtaatactattccggcggtattagtcgcctcggtgatcttgtggggcttccatattctggtattacgcggagttaaagaagccgcagcgataaataccattgccaccttcgcgaaaattatcccaatctttatctttgttatcgttctgatttttgcctttaaaggcgatgtctttgcgctgaacttctggggaacgccggatgtcgttaaaggggctgatttatctcatcttaatgattatggctacgttggccacgcggcggcggcaatgagcaccgtggtagccgagcctgaatcactattctcgcaggtgcgcagtaccatgctggtcacggtatttgtgttcctgggcattgagggtgccagcgtttattcacgttacgctaaagaacgcagtcacgttggtattgcgacggttttaggctttattggcgtgctgtgtctgctggtattaatcaccatgctgtcttacggcgtcatgctgcgacctgatttagccgctctgcgtcaaccctccatggccggtgtattagaagccatagtaggacgctggggcgcaatatttatcagcgtcggactgattatttccgtgctcggtgcttatttatcctggtcattgctggcggccgaagtgcttttttctgcggccaaaagtaacagtatgccaagaatatttgcgacggaaaatagtaatgcagtaccctccgctgcggtgtggctgaccaatatttttgtgcaaatattcttagttctgacgctatttaccgattatgccttccaactggcactggagttaaccagttctctaacgttgattccttatctgctcgtgggtgcttacggtctgaaattagcctggaccggcgaaacctacgaaaccaatgctaaaggccatcgaaaagatctgatttttgcattgatcgccaccttctacgcggcgctgatgttgtacgccggtggcatgaaatatctgctgttgtccgccattatttacggtccaggtaccatcctgttcattatggcgaaacgcgagcagcatcagaaagtctttaatggcgctgaaaaaatcttgtttgccatcgtgattatcgcagcggcggtcgcgctgtatagcattttcaccggaatcatcaccatataatttactggagctattatgtcggataagaaaaccaagaagtcaggcgcttacggcgtacattcagaggttggtactttacgcaaagttctggtttgcgcgccgggtaaagcccataaccgtctgacaccaagtaactgtgacgaattattatttgatgatgttttgtgggtagaaagagccaagcgcgaccatttcgatttcatgaccaaaatgcgtgaaagaggcgtggacgtagtagaaatgcacaatctcctgactgagaccctgcataatccggtggcaaaaaaatggattttggatcagcaaattgtacctaatgaagtttcgttaggcattttgcatgaaacccgcagtttcctcgaaggtttggatccgcgaacgctggctgagtttctgattggcggtttatctacgcgtgaattacacgaagtgggtaagtgcgacaaagaagaattgaagctgattcgtgaagccgtcggtattaccgagtatttactgccgccgttgccaaacactttatacacccgcgataccacctgttggatatacggcggcgtgacgttaaatccgctgtactggcctgctcgccatgaagaaaccatcctgactacggcgatttataaattccatcctgatttcgccaatgccgatatcaatgtgtggtggggggatccgactcagcaccacggttcagccacgctggaaggcggcgatgtgatgccgattgggaataaaaccgtcctgattggtatgagcgagcgaacttcccatcaggcgattacgcaactggcagcttcactgttttccaataagaaatctggggttgagcgcgtgatgattgcggcgatgccgaagctgcgcgctgccatgcatctggatacggttttcaccttctgcgatcgcgatgtggtgacgctttacccggcgattgttaatcagatccagactttctcactacgtccggatgatggcccgactggcatgaagctgagccgagataaaggcacctttgttgacgcggtagccggtgcgctcaatctgaaaaaactacgagttgtggaaactgagggcaacgattacgacactgagcgccagcagtgggacagcggcaataatatggtcgccatctctccgggcgtggtcatggcgtatgatcgcaataccaaaaccaacactcagctgcgtaaagaaggggtggaagtgattgaaattgtgggcagtgaattaggccgtggtcgcgggggcggtcactgtatgacttgcccgcttatccgcgatgccgttgatttttaattgctgataaccgccagctgcggaacggttctcgccagctggcgacagtgctcttaaaaaatagtcgagagtggacagtgttatcacgctggtttgctgtcggctatctgtatttaaaatcgccgagtgttttgggcgacgtaatagatttttagaaaaggacggcactgtgaaatacgtttatacggtactttttctgttaattgtcacattaaccactctttttgcctttcagaacagcggcgccgttcaggtatcgctactctttaatgagataaccttgcccttgtccgtgctgatcgtcctgatttactttttgggcatgttgactggcggagttctgctaacgctgatgaataagctgattcgcaaagtgataaaaaaaaccgataacaaaaccgatagcaagaacgcagtcaatgggcgctgagataagggataaacagaatgtaaatctgatgatgttaggccgtttgtttctgtcgttgcgaagctatctgcggctaatcctaaccacaatgtcatcatattttcactttttaacccgatttttgctggtgcgtttcaaccgctgttgcgcaattgcaaccccaatatttgattgaacgagatctttatagtgaagacaaaaattgtagtgactctgttggcaacgctgttattggctggctgcgataaacctgcgcctgaagtgatggaaagcgtgcgcccggtaaaaatatttacggttgaagacagcggccagaacggcgtgcgttatttcccggcgcgattgcaggctggggatgaaacgcaactgtcatttaaacgtgcgggacagcttcagcaattactggtgcgagaaggtgaacaggttaagaaagggcagaatattgcgatgttgaataacaccgatctgaccttgagagtacgggatcgccaatcggcgtttaatctggctcgcgatcagttcaatcgttttaataccttgcaagggcgcaatgccatttctcgcgctgagctggatattcgccgagccgagctggaatccgctcaggcagcgctggatatcgctcgcaaagagctgagtgatgccaccatcagcgcgccttttgacggtgtgattgctaacgttagcgcgcgtaatcatcaggtcatggccccggggcaggtggttgcgaccttgagcgcactggatacgctggacgtggtatttagcgtgccggaacgtttatttaccgcattggatattggtaacaaggactatcaccctacggtgcgtttaaaccatttaccggatcgggaattcctggccgaatataaagagcacactacctccaccagcgctggctccatgactttccaggtgacgctgaccatgaaacgtccgccggacttaccgctgttgtctggcatcagcggtagcgttcgtatcaatacgcataaattaactggttcgacgaacgcatcgattattgtgccggtagaagcggtatttaatcccgatagcacccagctcaatgatgcgcgagtttgggtagttaaagaggataaaggccagctccacgttgaagaacgggaagtgcaggtcgggcagctgatggccaacggtatccggattacttcgggtttgaacgacggtgagcagattgttgccgccggtaccagcgagcttcgtccacagcagttggtgcgggcgtgggtccgtgagcggggtctgtaatgaagctaacggacaatttcatcaacaataacacgcgaatctggctaacgattctgttgctaggaattggcggacttattgcctatctgaatatcggccgtttggaagatccggcttttaccattaaaaccgcggtggtagtcactcgctacgaaggagcctcggcgcagcaggtggaagaggaggtgacgctgccgctggagaatgccatccaggagctgtcttacgtcgataacgtcaggtcaatctccagcgccggtttatcgcaaattaccgtcaacgtaggttcccaatacgggccgaacgaactgccgcaaatctgggatgagttacgccgaaaaatcagtgataacagcgcccgtttgcctcctggggccggtacgccgctggttaatgacgattttggcgatgtatatggtttcttcttctcgctatcgggagagggctacaccaatcaggatttacgtaattttggcgagcaattacgccgcgagttggtactggttaacggcgttgggaaagtcgctattgccggcattttaccggaagaaattcagattgatatttcgcgggcgcagatgaccgccgccggtattactccgcagcatttatcggatttgctgagtcgccagaacgtggtttccaactccgggcaactgttggttggcagcgaatcgatccgcctgcatccaaccggtgaatttaatagcgtgcaggaattgggaaacttattggtcagccagccgggcagcccgaaaagcgtctatttgcgtgatattgccaccgtgactcagggagtgactcattcgcctacaaatatttatcgtgcgaatggtcagcctgcattgggggtggggatttcttttgcgcctaacgtcaacgtcgtcacggtggggaatgccgttaaattgcggttagcgcagctagagcctgaacggccatccggcatgcacatcagtattttttacgatcagtctcatgaagtggaaggcgcggtaaacggctttatcctcaacttcctgctggcgttactgatcgtggtcgttaccttattaatctttatgggcgcgcgcagcggcattgttatcgcgctctctctggcactgaacgtgctggggacattattgattatgtggttgtttaatattgaattgcagcgtatctcccttggtgcattaattatcgccctcagtatgttggtggataatgccatcgtggtggtggagggagtgctggttgggcgccagcggggagataatattttcaccgcgatcagtaaagtggtgaagcgctcgatgttcccgttgctgggcgccacgatcatcgcgattctggcctttgcacctattggtttatcaaatgattccaccggcgaatattgccgctcgctgtttgaagtattactgatttcgttaatgctgagttggttcacggcgctgaccttaaccccggtattcgccaaatgggccttccaaaaccaaaaatcggctccggttgatgaagataagccggttaagcagccttatgacggctggttattccgtaactatcgggtggtgttgaataagctattgcagcatcgcagcatcacgctggtggtactgactgcgatgctggtggcgtctatttacggctttggtagcgtgcggcagagctttttcccgccttcgaatacgccgatcttttttgtcgacttatggctgccgtatggcacggatattagctataccgaaagcatcgcggcggaagtagaaaagcatatcaaggagcaggagggcgttaccgataccgttggcactattggtcagggcgcgatgcgctttatgctgacctataacggcgagcggcaatatgctaactatgcgcaaattatggtgcgtaccgatcggttgaatcgcattcccggattgatcgaagaaaccgaacaatttatgcaggatgaatacccgcaggtgaatgcgcggttgaagcgcatcatgttcgggccatccaataacagcgcgatcgaagcgcgatttaacgggccagatccggacgtattgcgatctctggctacgcaggccgaaaaagtgattgtggccgatcctctggctgatggcgcgcgtcatgattggcaggatcgcagcaaaatgatccgtccgcaattctcagactatctggggcgtgaactgggcgtagataagcgtgaagtggatagcactctgcggatgagctttggcggcttgccggtcgggttgtatcgggatggtacgcggttgatgccgattgtccttcggacaccggacgccgagcggttgaacgcagaaaggctcaacgatgtcatggtatggagccaagcgcgtcaggcgtttattcctatcgataacgttgtcaccagctttgaaaccgaatgggaagatccactcattatgcgtttggatcgtaaacgcacgttaacggtgcaaaccgatccaacatcggaaggcggggaaacttccgccgagttgttacagcggatcaggccgaatatcgaagcgatcaaactgccgtcgggctatgaactggagtggggaggcgattacgaaagtacgaaagaggcacagcaggggatcttcaccagcttgccaatcgccttcattatcatgtttgtcgttacagtgctgatgtttagctcggtacgtaacgctttggctatctggctaacggtgcctttagctttgattggcgtgaccgttggtttcctattaaccggaattccttttggttttatggcgttacttggtctattaagtctgagcggtatgttgattcgtaacgggatcgtattggtagaagaaattagcctacagcgacaggaaaaaccgctgcgggatgccattattgatgcctcgaccgcccgtttacggccaattatgctcacggcctttaccacggttctggggctggcgccgctgctgagcgatgcgttcttccaaagtatggcggtggtgattatgttcggtctgggttttgcaacggtactgactttactggtattgccggtgatttacagctgtatgaatccagagccaaaaccgcagccgactaccgagtaatgtattttttcagctaaaaaaccgtccgatggacggttttttttcggctgtggtcagaaccttgtttataaaaacgcttttttatcgttcctcgattttcccatctgtgcgccagctctcttattaactgaattaacaaccctctttgtttcacaatgaaactcgaatttccattggtggtttcataatggaacgttttccctgccggttactcaacggtttttctcgctctatagtggttttagccaaagtaaaaccgtctcccgccaaagaccgatgctgacccgagacgccaccttctaaaatacatttacgcttcaggagccagatatgcttaaagtcattcaatctccgtctaaatatatacaaggcgctaacgcacttcagtctattggtgagttcgctaagctattggcaaataactatttcgtcatcgccgatgacttcgtcatgaaactcacgtcggataccgttggcagcagcctgcaggtcagcgatgttaaatatcacttcagccagttccgcggcgaatgctctcgtaaggaaattgaacgcctgaccgtagagctgaaaaaacacggttgtaacggagtgatcggtatcggcggcggtaaaaccctggatacggcgaaagccatcgcccactatcaacatattccggtggtcgtagtgccaactattgcctcaaccgatgcgccaaccagcgccctgtcggtgatttataccgaagaaggggagtttgctgaatatctcatttatccaaaaaatccggatattgttctgatggacagcgcgattatcgccaaagcaccggtgcgtttattagttgccggtatgggggatgcgctttctacctattttgaagcacaagcctgttttgatgccaaagctatcagtatggcgggcggagcctcaacgctagccgccgtgacgttggcgcgtttgtgctacgacacgctgctgacggaaggttacaaagctaagctggccgtagaagccggtgtggttaccgaagcggtagaacgcattattgaagccaacacttacctgagcggcattggttttgaaagcagcggtctggcggcggcgcatgccattcataacggttttaccgtactggaagagtgccaccacctgtatcacggcgagaaggtggctttcggtacgctgacacagttggtgctgcaaaacagcagcatggagcaaattgaaaccgtactcgatttttgtcagcaattggggttacccatcacgctgggcgaaatgggcgttcatcaggatatcgaaaagaaaatccgcgcagtggccgaagccagctgtgccgagggtgaaaccatccacaatatgccgtttgccgttacgccggacagtgtttacgcggcgattttggttgccgataggctggggcgcgctttcctcaactaagttgaattcattgtgataacgaaccgggccgcctgtgggtcgctcggttctgccccacacgggtaaacgagcctctttatggagcacagcatgaaaaaactgattaatagcgttgaaagcgttttacaggaacaaattcaaggtttagtggaagcgcatccggaactgactctgcatcaggaaccgctgtttattactcgccgagatgcgccggtacaaggcaaagtggcgctgatgtccggtggcggcagcggtcatgaaccgatgcactgcggctttattggtgcaggaatgctggacggtgcctgtcccggtgagatttttacttcgccaacgccggatcaaatgttcgagtgcggtcaggctatcgacggcgggaaaggcgtgttaatgctgataaagaactacaccggcgacattcttaattttgaaaccgcagccgaactgctgcacagcgaaggcaccgccgttgccacgctggtgattgatgacgatgtcgcggtaaaagacagcctgtacaccgccggacgccgtggcgtcgctaatacggtgctgatcgaaaaattattaggtgctgccgccgaacgcggtgattcactggatgaatgcgtggcgttaggacaaaaaatcaataatcagggacattccatcgggattgccttgggagcctgtacggtgcctgcggcgggtaaaccgtcctttattttggctgaaaatgaaatggagtttggcgtgggtatccacggcgagccgggcattgaacgccgttcctttacctccctggatagcaccgttgacgcaatgttccagacgttgatcgaacacggacagtatcaacgcacgttgcgccactgggatcgccagctgggcgattggcaggaaactcgtcagagcaaacagccgttggcggcaggggatagagtcgtggtgctggtgaataatctgggcgctacgccgctgtctgagctgtacggcgtttggcatcggttagccgcgcgctgcgccgagtttggtttgaaagtcgaacgtaaactgattggctcttactgtacttcgctggatatgcagggtatgtcgattacgttgctaaaagtggatgatgaattactcacgctgtgggacgcaccggtcaatactcctgcgctgcgttggggttgttaaatgtcggaggaaaaaatgggattaaccaaacaagatatcgtcaattggctgcaactatgcgccgaggtttttactcaacaacgggatttcctcactcagctagacactgaaattggcgatggtgatcacgggctgaacatgaatcgcggttttaacaaagtggtcgaaaagctcccttcggtggcagacaaagatattgggttcatcctgaaaaacaccggtatgacgttgttatccagcgtaggtggagccagtggcccgctgtttggcacgttctttatccgagcggcgcagagtactaatgctaaacaaagcctcgatctttccgctctgtgccaaatgtttaaggacggcgttgagggcgtagtgatgcgcggtaaggcagaacccggtgataaaaccatgtgcgatgtctggtgggctgttgtggatcagttggaaaaggccaatcagcaaggtttatcagtggtggacgcattgcaacaaacggtggaacgctcgcagcaggcgctggccagcaccattaccatgcaggcgcgtaaaggccgtgccagttatctcggtgaacgcagtattggccatcaggaccccggcgcgacttcggccatgctaatgatgcaggcgttattgcaggtaaccagccgttagccatgcgcgttccatgaactgcttgccataaagtatcaaaagtgtgtccgtcaggccggtgcgataaccgcagggcagtatcagattccaggaggaaagatggtcaatatcgttgtagtttcccatagtgcgttactggctcagggcgttgccgagctggcgcagcaaatggcgcagggcggatgtcggttggctctggccgcaggggtggacgacgtggatcatcccatcggcactgacgccattaaagtgatggaagccattgagtcagtttacgatcccgccggggtattggtgttgatggatcttggtagcgccgtgctgagcgctgaaaccgcgttggacctactcgatccggagatggcggccaatgtgttgctgtgcgcggctcctttggtagaaggcacgctagcggcggtagtcgcggcatcggcaggctcatcattacaacaggttcgtgccgaagctatgggcgcgctggtggcgaaaagtggccaattaggcgaagaaatccagtcggaagaatctggctctgcgacgggattcggcgatgatgcgcaaagcgtcagctggcgagtgcaaaatcccaacggtttacacgttcgcccagcggcaaagttggtggaggctttggcaccttttgacgccgagctactgctggaaaagagcggtaaatgcgtgaacccacgtagcctgaaccaactggcgattttgcaagtacgtaaaggggataccattcgcctgctagctcgcggagctcaggccgaattggcgctggctgcgtttgaacacttggctcagcagcattttggtgaatcagtcgcgaacggggataacgcggaactagcgggaattatggtgccaaacggagtcgttcgtgggccaatactccagcttcctcctgcgatgacggcgtttattccccgcactatcagtgccgaacaagtagcggacgaacagcaacgtttacaacgggcgctgatccaaactgcgacagatttggaatctctggctgcgcaggtgggagaaacgcttggtgaagaatttggggaaatattcagcgctcatcagctcctaatcagcgatgaagagctgcagcaggcggtcaatcagcggatggctcaagaacgtgtttgcgccgagtccgccctgcaaagtgagttgatggcaatggccgcggattatcaggcgctggatgatgaatacctgcgggttcgcgagctggatattcgcgatattcttaatcgggcgctgggacatctgaccggtttgccgttggtttcgttgcacattggtggtagcgcgttgctggtggcggatgagctaatgccatcggcgttggccgggctgcgccgacagcaagtaaaaggtatttgcctgagtcaggggagcacggtgtcacacagcgcgatcctgtcccgcgccttggggattccaatggcggtggggatgagcggctgtttggatgccactcatacaggcatgatggctgaactggatacagccagtggcgtgttaaaaatcaagggggaagctaccggagcgaaggagactcgccatcaaagtagctatattccagcaaaataatatgttctcagcgatatgagaaaaggagccagaattggctccttttctctgcttaactatcaagatattaaaccgtttctccgcctttaaactgtccgatatccagccggtgcagcttcactttacgccacagtgtggtgcggccaatgcccagcaaggttgccatttcattaagctgaccctgacacaccagcgcggcgcgaattatcgcctgccgttctagctcttgcagtgatagcacgggctgcggctgcggggcgtccggttcaagaagcaatttttcacccagcaaatgctcaggtaagtcattgagacgaattcggttattgcgacaggacatcgcagcgcgttcgacaacgcttttcaactcctgatcgttgcccggccacggatactgattgagctggcgattaacgtcttcatcggtctgatactggcagtgaaaatgctgccctaaatcccgcagggtatggtgtaccagcagttgaatatcctgttggcgctggcgtaacggcgggatatgtagttcgaaagactgaagggtatagaacaactggcggcgaaaacgcccctgtttgactagcagcggcaaatccgcgccagtggcggcaataatccgcacatccaccggaatcacccgattggaattgacgcgcatcagaatgccggttttaacgatctgcagcagcgcggactgcatttccggcgacaggtattccacctgctccagatataatgtgccaccgttggctaactcgaatttactcggttgtccggcctcgccttcgctggcatcgctgccgaggaattctcgtgccattaagctttgcggcaatgcctgacagttcaaagcgatataagggccatcggatcgttcgctggcgttatgaatcgcctgccctagtcgctgttttcccacgccttcttcaccgtgtagcaagataggatgctggcctttagctgcctgtttgccgtaacgaaccaaacggcgcatttccagagagctaaccggcatctcatcgaaggtatggctggcccggcccaattggttgtgtaccatttggcgcagcagttcctgtggatgcaacaatgcgataaagccgcaacgatcgccgtcgggtatgggttttagcgtgagtaacgccggaataaactgctgttggttctcaaacgtcacctctacgtgactgagaggactgcgctgctgaattgcgtgggtcagcagagcgggaagcgtcagtaactggttgaccggttttcccagactattggttgcatccagccgcaaaatggcggcggcgcgccgattgagatacagcaggcagccacgctgatcccaggccatcacgccgtcctccacgccgtccagcagggcgtttaactcattcaaatggcgattggtttctgccagcaagctgtccgcatgcagggaattaccgatttcccgcgcgatagccagagtcagcggtaaatcactggcggctttttccgttagcaaacagcccaacacgatcacggctcgctgtcgcccgctgttgtcgtataccggcgttgcgcagaaatgccacggatgtagcgccagcttaaagtgctgactgccgctgacctgcattgggttaccttcggctattgctagcgccggagcgttagtaccgatcaaaccttcggcccagtagctaccggcggtaaaacctaattcactgagctggcgcagcgttttcggatgaccgcattgccacagggtacagccgctttcatccagaataagcaggctgcactcgcgggattccatatattcatacgcatcttccagcgccgcttgtcccagaaccaacagatcgtttttacgctggcatatcgagctgaacgttgcgccagccgcccgatgcggaattcgccaagtggcgggttgcatcagtttatgacagcgttgccaggaatcattcagtgcgggcgtaaccgccggcgcctgagagttgtaagctgattcagtaggaagcggggcagactttggggccaaaatagatttacctcaaccagacagtgatctccaaaaaccgagaatcactattaactctgattattgtctgaattgctgtgaagccgcaggcaaatgcggctgtcactttattcgcagcgaattgactgagggaatagtgagctttcaacctatcaagctttagagtctggatgacgccagtgaatttgccccggcagaatcagccgctgctgttctaacggttgctcggcgatcagagcggtaaccatctcgaagctatgacgcgctagcccttggcagtcctgagcgatggtatcgatttttagcggcaggcagtcaaacaggtaatgatcgtcaaagctgcacaggtgaatatcgctatccatcaattgatattggttcaggtaacgcagcaccccttccagcaggccacaggcggcggtaaataccgctttcggtggtcggcccaattgagcgcaaagttgagcgatcatttcatagccggagctaggcagataattgccgttgagtatccattccgggcgacattctacgccagcgcgctgtaaaccctgctgaaatccgctcaggcggtcgcgcgtcggtgaaattcgcggctggccgccgaggaaataaaactcatcctgatgttgctgcgccactttctccaccagcgtggcggtagaggtaatagaatcggtgattaccagtggaagatccgattcgccgatcagccgatccatttgtatcaccggcagccgagtgttgatcttttggtattcgctatcgttcagctggctggaggcgacgatcaaaccgtcaacctgacgctgcaccagactgttcaccgccatcatttcctggctaggattttcatcggtgcaggcgataagcagttgtaacccggcttcgcgacacagcatttccagctcgcgggaaatcagggcaaaaccatgattggtcatttcaggcaccaccagacccagcgtatggctgcgggtcgatcgcaaagaacgagcgtggaaacttggctggtaattgtgttcgttggccagagcgataatgcgatcccgggtttcgtcagaaacacgatattccttactgcgaccattcagaaccaggctggcggtcgatttagacacaccagccagtttagctatatcgttaatagtaatacgtttactgtttttcactgactgcatctgccaccgggaaagatgcccttattctaacatgggtgacagtaacaaccagtgccgcaggtgcagttcacccttgccgctgaaaattgcctgtggttcaggctgagggaaatagctggaagtcatgacgccttcaccattgttgataaagatttccacgctacagcggtcgaaaagcagctgtaactgatgcacagaaccgcgccagtagcggaactctcgctcgcctgtacgcagattattgcgactaagagtcaggcgctcgccgtcccactccagcgtcatggtgtcggccagttgtagggtgaactcgccgctgatttccaactggatttccgcattgtcgatgcgaaacggtggtgcggcatcggcgcttcctttccactggaaaagaacggtgcgtagtgcggttaattcacgggctggttgctgaataattttgccattacgcagcgacagctcgcgcggactgctcatcgtgtgaatccagccgtaattcactgttggctgatataactcatcctgattcggaatgcccatccagccaaacagtaaacggcggccatccgctgccagcgtggtttgtggggcgtagaattcgaatccggcgtccagctcgtggaaagcaccgtggttaaactggccttgctgataatcgagttttccgcagacataaccggcctgataagtattgcgataacgttcggcctccgctgccagcccttgcggacagaagatcagcacatcttcgtcgccaagcgtaaacagatccggacattcccacatataaccgaagtcattcaaaccattgataccagaaccagcgatttcacccagactttgccattgatgcagatccggcgaacggaacagcaacactttgcctttcagctcaagatcctgtgcgcccagcaccatgtaccactgaccgtcgtgctgccaaactttcggatcgcgcacatggccggtatagccagcaggtaggctcagtactggccccagcttatcgaattctccgcgcgcattctctcgcgccagacattgaaatgcggtgcggctaccatctggatatttcacattaccggtatacatcaggtgaatgcgttcgtcgtggatcaccgcagagccagagtaacagccgtggctttcatattcttcgctcggtgccagcgccagaggctgatgttcccagtgaatcaaatccgcactgcgccagtgtccccaatatttactgccgtgggcgcaggccagcggattccattgataaaataaatgatagtagccagcgtgatagataaaaccgttaggatcgttcagcagcccgatgcacggagccaaatgccagccgggccgatgtggatcccgcgcggcccgaacctgaccggacatcaccgccaacgtgagttgtttgagtaaactggcttcttgcattattcactgtccgttttgtatttcagcagcagcgagatgataaaggccgagctgaaagcgataaccaaaccaatcagatagctgacaatggcactgctttgaacgatagccaaaccgggaatgccggttaaaccaacggcggtcataccgacgtgattggcaaccacccaagcaccgcccagagcgccgccggctagtgcggccagaaacggcttcacaaagcgcaggttaataccaaagattgccgcttcggtaatacctagcatggcagagaaggccgacggcactgctatagccttgattttgacatctttggttttgaagtacaccgccagacaggcaccgccctgagcaacgttagccatcgaccaaatcggcagcagaaagttaacgccaatgtttgggttacccagtaatccggcctcaatcgcgtggaaactatgatggataccggtaatcactatcaccgaatacaggccgccgaacagcaatccggcaaaccagcctgcgtgggtgatcaaagtgctgaggatcattgaaataccgtcgccgagtacccgacctgccgggccgatgaacagcagtgcgataaaaccggaaatcaccacggtgaggaagggcgtcaggatcaaatccagcgcgttaggcaccacttttcgcagccgtttttccaccatgctcataaaccagaccgccagtaacaccggaaacacggtgccctgatagccgatcatggcgatttctaatccgaaaaaattcatggtgtggaagccgcccgcaacgccccaggcgttggtcagtgccggatgagtgagaatcccgcccaacgtggcacccaaataagggtttccgccgaactctttcgcggcggtaaagccaatcagaatcggcaaaatgatgaaggcggcggagctgaacatatccagcatgataaagatggcgctgtcggcgtcggcccagccataggttttcaccatccccaacagacccattaataggccagaggcgacgatagccggaataattggcacaaaaatattcgacagtaaacgagcgacccgttggaacggattgagtttttttgcggccagatcggctgcttcagatttactggattcgtttacgccggtttgtcggataaattccgcgtgaaccttattgaccaaaccggtgccgaaaataacctgaatttgaccggcgttactgaagcaaccttttacgccatccagtttttcgatggcggatttttgtaccagattatcatctgccaataccagccgcagacgggtggcacagtgggcggcactgacgatattttccttgcctcccagcagcgggagcagagccgaaacggtctcagtcatgttcatttttttccctcattctatccagcaaagccgcgttcagattcgcatagcggcctttctcgtagcgatacattgttatttatatacagggtgactttatggtatgtccgccgtcattgcggttcgacggccagttattatcagaaccaggtttccatttgcacaccaaagttccattggccaccggcggtaaaatcatttttaccgaaagcatcctgctgagagtagttatccagatctttgctccagtccatataggtagcgaaaacgcgcagttccggacgactgaagaaattcccaatatcaccggctttaaaggttggtgcgaaggtcaatttatagaaaccgccgctgacatctttatagttgttgtagccccgtgggtctaaattcatatattggtaggtgccttcgtaggccagcgcaaagttttcggtaatttcctgaataaagcgggcgttgaatgtcacccatttatagctgtcaccttgaacataacgatcttcactctgctgagccataatcgccggtgccagactccagttcttgctgagcggcgtggtgccgtaggtggcgatacgccaggtatcggcgctttcgttgagattgccgtcggagccaaggccttttacttcggcacctaagccgtggccgtaaagcaccgcgattttagctgttccttcgcgcaggccgtagaagctgtcgccgtggtaggccagcatagcgtggaagcctttctccgctgcgttatcgctggcgacaatgccgttgattttccgctgatcgttatccttggcacgcaggccacttagcatgaactggaatgggccagcgaagttattggcagtgaaaatgtagttctggatgtcatcatcgatgccttcaatggcaccgaaattacgaccgtaaagtgaaaagttgcttttcagatcttcattccatttcacatcgtaaataccgccgccggtgccgccgaggaataccacatcgctatccaaccagtgaatatcaaagttatcccgatcgaaacgtttaccggcccacagagtactgtccttgaatatgcctgtgaaagtcggcagagagcctaattccacgaaagcctgacgcacattgagtttgctgttattgccggtccaatcgttatagtcgcgctgaccgtctgccagcatcgctttaaagcgagtcgttgcgccgtttgacagagtctgttttttctccagactcagctcaacgtaagtatcgggttcgttgcccaaacgcccaatattgccgccggtactgcctgctggcgtaacgtccgggccgccttgggtacgggcaccattactattcatcagcagcccggaacgggcatagccgtggaactcaaagccactttctgctggcgttttgctttccagcttctcagtgcgcttagccacttctactgttttttcttccgcctgcgcggtgcgtgcttctaattttttcgcctgtttttctgcaatttctgctcgtgcttcagcctgttgcgcccggcgctctgcctggtgtaagcgttgttccaacgcatttaagcgcgcttcaatgtcactggtggaagctgccgtaacgctggtggccgagcatgagagaataagtccaatagttacagcgagatagctaggttttatcatcatttttatatcactcgatatgtgattcgttgttatttgctaaacagctaaaccggtttttcatggctaacataatggagttaaccctgagttagcaaaacattttgctaacccgtttcagccattgtgatccagcttacaaatcgatcgtttcaaacggagctggccgggtttttagccataaaaaagcgcgccgggatcggcgcgctggagaagtcactcaatgagaggggggttaaagcgaggtcattacctgaataccgcagactcctgtggtgctgaatgttcggtttcatcggcggcgacccatttataaatatcaccgcgctttttgctggcatatttgatttttacccaagttttatcggtgttttccagaacggttaaatccacgatcgcgacttgatcgcctttcaccagatacatcgctgatttctgagctttgttcggtgcattatacagacgtaacttttcatttttcactgtataaacatagggttcaccttcaatcccaatagcctgttggctgattttcttaccttgaggatcgtagtatcgttcgaaaaaagcgaaggttgaaatgtcgtgatcgggagcaacgcccatgtttaattccatatccgaggccagataaagcttcccttgatcatcgtatttaaatttgtcgctataccagactgggccgccacggcaggatgaaatgatggttttgtttttctcatccagcgtcacatcggaaaactggccgcaggcgccaggattattcggttttagtgctttaaattggcctgcttcaggctgccagaggtagatgaaagtctcaaaattcaccatgccgaccggcacatcgatggcgatatcgttataaccatcgaagttgaaatcagtgaaactggctcccggatttttaccatcatcaataaattcaaaaccgcccagttcctgagtttttccggagggtaacagcacctcgaaacgcccgccgtcgctatttgatccttcaaactgctcaatagttaattgccctttatggtctttatcaataacaaaaggtgttggtgtagcaaaagctgccacgggtaagacgctgagcagcaagaccgcagacaaagatttcacgttgagttcctttcagaaaagaaaatagcgggcaggtaggttcagacaggaaatatatagtggggttggaggaaaggcaaataagcggttactgccgaataactacgataaaacagagagatccggcaggtatcagcgggctaaaccggggtttttaaaaaatgagccagttggctggagcttggcaacgcggtcatcgcgcctttggccgtggtcgccagtgcgccgcaggcttgagcctgagcgattgcagcgggaagatctgtgcctttggcccagtcttgctggtcagccagggcggccagcagcccggcgacgaaggcatctcctgcgccagtagtatctaccggagtgactttgcggctcggatattgctgcaaatccgtgcgattatgcagccatacgccatcagcccccagcgtaaccaacagcagtttgcacgggaagtgtgccattatttgctctatagctagggtggtttcatcggttccgctgataaatgccagttcttccagcgacagtttgactacgtccgccaattgtagcgcctgatgcaggcacggcagcaattcctccggattttgccaaatatcttcccgaatattaggatcgaagctgacccaaccgccggcggctttgatacgcttcatcgcttcaaatgcggtgcttcgactgggttcacggctgagcgcaatggagcaaacgtgaagccactgatgggcttcaaattccggtaaatcatcgggttgtaggaataaatcggcgcttggattgaccataaaagtaaaggatcgctcgccgtttcgatctaaatccaccaccacggttgaggtgtgatagtgaggatcttgcgtcatgtagcgggtatcgacattttcctgctgcaatatctgctgcataaagcggccaaagctatcgttgcccactcggccaataaaggcgcttttaccgcctaaacgggcaattcccacggcgacgtttgccggtgctccgccgggacatttaaggtaactatttgaattatcaggcaccagatcaaccacggcatcgcctaaaacccacactgaattcttcatgatgatcctcaaatttatccgatcctattggtggctaaaattagaagaatcggtttagcaaagcaacaaaattcctgaagtaatcagaaaaagtgagtcataacgtgatctaatcgattttattgcagtgagaaatattgggtagtttaaaaacaaaagatatggattatcattagcgttcgaatcttattatgcatttatcaaggatatatcatgtccgttagtcttctccgcgcagcccgctggctattggcttcgctggcgatccttatgtcctggtctgcgttggctgcacctattgtggttaccgatgtggcggggcgtgaagtgacattgcctcagcccgccgccaaagtcatgttggctgacgccagagccttgctggcgctgaatattttgcatccgcaaacgccgctaaaaaatattattgcttgggataattcgctaaaagtcaaagcgccagatctggtagaggcttacgcgaagacattccctgaaatcaataagattcctatttttgaaaacccctacgtttctgattttagcgtggaacaagcggtagttttcaggccagatctaataatttttgatattggcttgctggaaaaactgaaaagcagcggcgtgttagggcagttggaaaaagccggactgccggtattaatcatcgatttccgtcagcagccgctcaccaatacggtgccaagtatgagattactcggcaaagtctttggcgaagaggcgaacgctgaatcctttattcagttctatcagcaacgtttggatttggttcgtgagcgggttgcggccttaaaaccagagcagcgccccagcgtgtttatcgaacgcagcgccggaatgaaaggcgatgattgttgcagcacttttgggaaaggcagtttcggacaatttatcgatgttgcaggcggtaataacgttggaagcaagctgtttccggcaatgggcggagacgttaacgtcgagcaactgattgccagtaacccggatttttatctgatgaccggcgctgactggagtcgcgggcaccgaggtactttagcggttccgctaggttatagcaccgatgaagctaccacgcaggcgcgtctgaaacacctgatgaatcgcaccggcatcagcgtgctgcaatcggtcaaagataagaaggttatggcgatttatcatcagttttacgatacgccgttcaacgtgattgccgttgaagccattgctaaattcctgcatccggagctatttagcgatcttgaccctctggcagatatcaagatgttgcatcaaaaatacaccgcgctggattacagcggcgtgttttgggttcaggctaaataattcctgccacgctcatttctcctgctaatcctccccttacgggaggatatttctgagcctgttctattgaggcaatattatttgccattttgaatattcgctctgctcaaatggcttgtgcgcgtcatgtttgtttgtggttttctacgtaaacctttgccggccaagacttcgactgaaataaactctgattcgatttattgccaatatcgatttacttggtaagcagaatcattaagattagcgtttctaaaaaatacattcatatacatttcctttcggaataaacctcatatgtttacttttactcgtctttccttgctagctgcatccattgcgctggcattgcctacctacgccgcggataaaaaaactcaggctgatgataaccagccaacggccactcaggatgcacccgccacgggtaaaagcgacacgctttcggtagtgggaaactggttggataacaccgataacagtacggttgtgctgaatcatccgggggcgcgaaccatcgtcacccagcagcgtttgcaggaaaaaggtgcgcagactatcggtgattcactgcgcggtattcctggtgttcaggtgcgcgaaagcaacggtactggcggtagcgatatttctcttaacgttggcgttcgtggtttaacttcgcgtttgtcaccgcgttccaccattttgcaggatggcattccgctggcggtggctccttacggacagccacagctctctatggcgccgttatccatcggaaatctacagtctatcgacgtgattcgcggcggcggtgcggtacgttatgggccgcagaacgtcggtggaattattaacttcaataccaaagcgattcctaaagagtttagcggcgcggtgagcgcgcagactcagggcgctagccacggcggcctgaaaaccctatccagcgcttctttaggcgggacggcggataacggcttcggcgcggcgttgatgtactctggtttacacggccaggggtatcgcgatagtaacgacaataccgacatcgacgattttctgctgaaaactcgttatgaaatcacgcctaatgatgagctgttggccaacttccattattacgaagcccacgccggtatgccaggcggcctgaccagtgcgcaatatgcgcaaaaccccttccagtcgactcgaccattcgatcagttcgatggccgtcgccgcgatatgtctttcaaatataagcatcaggaagaagataagcagtttgaattactgacttatttcaccaaaagcttccgcggtagcaatattgaatctgaaggcactggcaataatgtgggtaaaaaacggatggttgcctatccgcgcaattacaccacttgggccattgagccgagttattcccaattattccatttaggcagcacttcccatgaggtgacggtaggctatcgttatctgaatgaaaccatggacgagaaagcatatcgttctgtctggtatgcaccgagttcagcgtcttctacaccggcgacgccggattactaccaacacacctctggcggcactgaagcccacgcggtgtatatcgatgatgcggtaaacgttggcaactggacaatcactccgggcctgcgttatgaaaaaatcagcactaacgtcgatgattctttctcacaaacttctcgtgagaagcattacagcgagccactgccatccctgaacctgatgtatcatctgtctgatgaatggaagctgtttgctaacgcgaatacctcttttggcagtatgcagtacttccaactgagcaaaggtggcaacggtaacgcgcccgcgccgggtctgaccgcagagaaggcgcatacctacgagattggtactcgcttcgacgacacacttctcaccggagaagtgacgctgttctacattgatttcgataaccaactgcaatacatcagcaacgatatcggctggaccaatctgggcgcgaccaaacatcaagggattgaaatggcgttcagttacgatttgagtgaattgaacccgacgctggacggtgtgagcgtttataccagctatacctacaccaaagcgacgaccgaaggcggcgcgtttgcgggtaaagatctaccgttctattcccgccaggtatataccgttggaacccgttaccagaccggaaactggacttggaatctggatagctatgcgcaatctaaacagcgttcaccggggagcggcccgatttatattaccgaagaaagcgccgacggccagtttggtaatattccgggttatatggtgtggaatactcgcgccgaatataatttcgggccacagtggtcaaatctgacgttaggcgctggggtaaaaaacctatttgaccaacgttatttcactcgttcaaatgataacaattccggcaaatatgtcggcgagccgcgcaccttcttcgtgcaaggttctgtagcattctaaagccgttcacccggccaaatactggccgggtttctgatagtgtttcgagcaatttttcctgctccgcaatttcctttcgctatttcgtgcagccatcctttcaaaaaaattatgcctgaaacagcagaaataacattctataaaaatagttactaaactaaattagccgcgtttagatagtcaaaatatacctcgagcgcgataagttacgtgaattattttcacaataaaccgactgattcattccaataaactcaacgcatttttaatgtacttatttaatggtttgtatgactaaataaattttttatcccgtttggcgtggtgaaatccaatgtctgcggggagcgctctggtatttaactggcagggcaaatacatcgccccacaggaaagagatagtctggctgacaaccgatatttagtggacggattccgcggtagcgagcgtatcgctggcgaaagcgactttattgcgaccgtttttcttggcttgatacagtgcttcatccgcggctttcagcgaagctggcaaatccaagggttgcagcggtgaaatgccggcgctgagcgtgaccgtagtggatactttatgattgaaaacgtggggaatatccagccctagtacgcgctggcgaacgcgctccgccagctgtgaggcgtattcttcgctaacgtgggtcagcaataccagaaactcttctccaccgaagcgcaccacgatatctcgtgaacgcacagcatcgcgaatggctgcagcaacccgcaccaaagcctgatcgcccatggtatgaccgtagttgtcgttataggccttgaaatggtcaatatccagcaacaaaacataatgattacccggcgactgcgttagcaggctttccagcttactttccaggccgcgtcggttataaagattagttaatgggtctatcatgcttaaatcactgaatttttctcgttcattatataaatgggcgaccaattttcgggtgaattcatcgctgcggcgcagcataagatgatgtaagcaaaaaccaatgagtggcagcataacagtgaatataatgcggaaaatattctggaaatcgtccagaaaaatcacggcaatcgccgctggcgctgaatgtaaacaaaaggcgataaagttatcggaaagcgcgatagtgctgataaagaaaattgtaaacaggctgatcaataagaagttattttcgtctcgccccaaatattcatattttagaatgatttgccatgtccacagaataccgagaataaatgcgaatatattcagtttattcgcataatccttcgaaaaaaatatgttaaataacaatgcactaatgctgagaatagcaatcaataccaccggcaaagtaaatgctggagtgtagtgagccggtaataacatattaaaaatagatgaagacgcatttaaaaataaaaagagcagtaaagagagccgatgcttacttttcaatagctgatcgtaggaatggccgttcatattaaattcactctgtgtatgtaatgctgtccgcagacaaataaacaatatcctcatgccgcctgatttaaggggcacgataaatagtttttctttgaaattattctgatttaaatctttttaagatttttcttaatacaaaattaccatctttggatcggcatgtcatcatgatgtcgagctgctacgcaaaatgatgcacttaactacagagtgttatatgatattggttatcattatcacttagtgtgggggtattatcatgattggagcgacaatagcagcctgccggtcgtggaggctgaacgatttcttactgagtcgaatggccagcggatggggtgttttactgccttgtgcgcttttacctttgctgggttggggggattttagcgtgaccgaactgcgtggcattattgtcgccgcgatgttggcaacgttgagtatgctgtaccacccgcgcctgcgccattttctgttgattccttcctgcctggcaatggctggcggtctactcgcagttttgacacatctatgaatacgggctgaatgacggcgtatttagggcaaaatagggaagtttttttgggaagataaccaagtgctttcgagcgagtaccgctaagtgagctatagccacatgctatatcacttgcacataccaagaagggagaaaaccgaggaattcaatcagtgtggtgcgaagggagggacttgaaccctcacgtccgtaagaacactaacacctgaagctagcgcgtctaccaattccgccaccatcgcacatctgattgtttttactgctttaatttatgtcaccagcttggtgcgaagggagggacttgaaccctcacgtccgtaagaacactaacacctgaagctagcgcgtctaccaattccgccaccatcgcatgatgctgtgtaacataaatcttgtgattgtttggtgcgaagggagggacttgaaccctcacgtccgtaagaacactaacacctgaagctagcgcgtctaccaattccgccaccatcgcgtaccatgttcatcacttttgtgatgcaaccacgggggcgaattctagagattttcctgttcaggtcaatacttatttccctttatcgggacggttgctgtaaaaaacagcatatccgcagttattcggctgattcattgagatatcgggcttttcagcgctatttttcgtcagcattactgatgagttcatcggaaattaaaagctttctcatcaataagaagcctgaaatatgtgagagagttcgggttgaaaggcgggcaaagtacggaataagtgagtaaacggtgtttacgccatgcggcagcggctatgcgctgcaacatgacgtgctgatcttgaaaatttcaacgttagcgtattcaaacgccaaattattacagtatcagattattaacgtttggcttttgcgcggggagcgcggccaacggtcgcctgataaaccttaaaacgaccattttgtgccagtacttcatggctgccaaacgcggcatccagcagcgccggataaggcaggaaagagttagccacaatgcgcagcttgccaccaacgtgcaaatgaccggttgcaccacgaatgagcatttctgccgcgtggaaactggtttgtaacccatcatggaacggcgggttggaaatgatcatatcgaaacgcccctgaatgtcagagtaaacgttactcgcgatcacttcagcttcgatttcgttggcagccaaggttgcccggctggcttcaatggccgctgcgctaacgtcgctcagagtccatttaatcttcggtgactgtttggataataccgaagccaatacgcctgcaccgcagccgacgtccagcacgcgacctttaaaaggttcgttgaaggtggagagcagcaggtagctgccggaatccagcgcgtctttactgaacacgcccggcagggttttgatggtgacatcatcaacctgatagctatgccaccagccttccggatcaaattcaggctgtttatctaaacgcgcatggtacaaaccgcagcggcgcgcgctgtcgattttggtcaacgtggcaaaatcactcagcatttcttctgcgctacgtacgccacagcggttttcaccgacgataaaaatatcggtgccgattggcagcatagacagcagattagccagttggaactgagcttcttgcttgctttttggccagtagtaaatcagcgtatcactttgcgccagaaaatcggcgtcagccagcagaccgaattgaacattgtcttccagcgtattgctcagtaattgccagtggtgatattggttagtgtgaacacgcacctcggcggcttcgaactgcgccggtaacgcgtcctgtaggtcgcctgcaaaaatcacgcggcgttgaataaactcatcactatggcgcagcatcacttcactggctggggttaatgcggacatcagtcgttggctccttaataatatgatcggggattatagaggtttgttggcgcatattcgatgtgtttgctagcatagcgccgaaacacgggtatcttgacaggaaatagcatggcatcaagacgagactggctattgcagcagcttggcattacgcagtggacgctacgccgtcccgccgtgttgcaaggcgaaattgcagtaagtttacccgaggatattcgcctgcttattgtggcggaaacgctccccggtcaggacgatcctttgctgtgtgatatcgtgcgcagccttggcctgagtgccgctcagatatatagcctgacgccggatcaggtggcgatgctgccggaagatacgcagtgtaatagttggcgattgggtatcagcgagccgcttgcgctggccggtgcacaattacacagcccggcgttgaccgagctttatcaagatgcgggcgcgaagcgcgcactttggcagcagatttgtcaccatgaagcagatttctatcctgacgccagccgatctggccaccgcgtatcagattgagcaagccagccacgaatttccgtggacggaaaaaaccctgttcagtaatcagggcgaacgttatctcaactataagctgacggtcgatcagcaaatggccggtttcgcgattacgcaaattgtattggacgaagccacgctgtttaatatcgccattgatccgcagcatcagcgccaaggctacggccgcttactgcttgaacatttgattgaacagttggagacgcgtgatgtagtcacactttggctggaggtaagagcctcaaacgcccgcgccatcgcgctgtatgacagccttggctttaatgaagtatcggtgcggcgtaactactatcccagcgcgaatgggcgcgaagatgccattatgatggcgttacctttggcttaaagccggtttcgctgtcgcaggtattttcatcgattgtctatcccggttaaatcagggaaaatatcgcgctataacactgattctcgctttcctgaatcatgcatgactccgagtgatgccagagcagggcggcccaaagtagaaatatctaactatgtctccaagtgaatatgcacaagaagtggcgaaaagacgtactttcgccattatttcccaccctgatgccggtaaaaccaccatcactgaaaaagtgttgctgttcggacaggctatccaaaccgccggtacggtaaaaggccgtggctccaataaccacgccaaatccgactggatggaaatggagaaacagcgcggtatctccatcaccacctcggtgatgcagttcccgtataaggaatgcctggtaaacctgctggacaccccggggcatgaagacttctccgaagatacttaccgtactctaaccgccgtcgactgctgtttgatggttattgatgcggcaaaaggggtagaagatcgtacccgtaagctgatggaagtgacccgcctgcgcgatacgccgattctgacctttatgaacaaattggatcgtgatattcgtgatccgatggaagtgctggatgaagtggaacgcgaactgaaaattgcctgttctccaatcacttggccaattggctgcggtaagttgtttaaaggggtttaccacctctataaagatgaaacttatctgtaccagaccggtaaaggccacaccattcaggaagtccggattgttaaaggcctgaataacccagagctggacgttgctgtaggtgaagatctggccaaacagttccgtcaggagctggaactggtgcagggcgcttcccatgagttcgatcatgaggctttcctgaccggtgatttaacgccggtcttcttcggtaccgcattaggtaactttggcgtggatcacatgctggacggcctggtttcctgggctccggcaccgatgccgcgtaaaaccgacgtgcgtgaagtggtggcgtcagaagagaaattcaccggtttcgtatttaaaattcaggccaatatggacccgaaacaccgtgaccgcgtggcctttatgcgtgtagtttccggccgatacgtaaaaggtatgaaactgcgtcaggttcgtaccaagaaagacgttgtgatttctgatgcgttgacttttatggccggcgaccgttcccatgtggaggaggcttttgctggagatatcatcggcttgcacaaccacggaaccattcagattggtgataccttcactcaaggtgaagatatgaagttcaccggtatcccgaactttgcgccagagctattccgtcgtattcgtctgcgcgatccgctgaagcagaaacaattgttgaaaggtctggttcagctgtcagaagaaggtgcggtacaggtattccgcccaatctccaacaacgacctgatcgtcggtgcggtaggggtgctacagtttgaggtggtatcttcccggctgaaaagtgaatacaacgttgaagcagtatacgaatcggtcaatgtttccaccgcccgttgggttgagtgcaacgacgtgaagaaattcgaagagttcaaacgtaagaatgagctgaatctggcgctggatggtggcgataatctgagctatatcgctccaaccatggtcaacctgaatattactcaagagcgttatccggacgttattttccgtaaaactcgcgagcattaatctcagctgtatcccttataattcggggcatccactgccccgaatctttagttttcctcatcatttatacctctaagattcatcctactaatcttccgatgttgcccctttaggcggattcctactgtctttttttatctgtggtctatatttataagcgtgttaggcaatcgttcagataaaaacagtattctgaatcaatcagttaagcttttgtttgttcattgccaaacgacaggtttaattctgttaaatcagtcagtaagcgaaaatgtgctctggattaagcgttattgtcagttgtagcaggcagttttgcttcagtttgttaatccggactttgtttatggctgaatttaatggtgttttaggcaggcatcgcaattgtggattgcaattgcagtatgtctgaccgagcaagctcaatttttgcccgtttggaaatattgaagctacagtaattgtgaagtatccattgagtgagccacgaaaacggtggcgaaacaactgacactgactggcttcacaccaaaaaggaaaaatcgatgaaaaacactacatttgcacgttcagtgatggctgttgttttaggttctgcgttggttagcggaagcgtaatggctgaagacactttactcaataaagcatccagcacgatagacagcaccggtgcgaaaatcgatagctccatgaaaaaagttgataattacatggatgagagcgcaactacggctaaagttaaaagtgcattagttgaggataaaactattaagagcggcgatatctcggtgaaaactgaaaatggcgttgttgttctgagtggttttgtatccagccaggctgaagccgagcgtgcggttgctgtcgcaagcaaggtagaaggcgtgaaatctgtcagtgataagctgcatgtaaaagatcagaaaacacaatcagttggtgaatatgccggtgacgcaaccacgaccagcaaagtaaaagccaaactgttggccgatgatatcgttccatcgcgcaaaattaccgtagaaaccaccgctggtgtcgtcctattgacgggcgacgtagaaaataaagcgcaagctgagcgggctgaaagcatcgcgaaagccatcgacggtgtgaaaagtgtaaaaaacgatctgaacattaagccttaatacttccacagacggtctgtggagtagcaggccgttctgaagagcttaaaacccagagttgacccgttagtcgttgctgaagcgctctatggatggggctttttgaagctacaaataccacagtaagcgtgttgttcagcactacagcgggtcaattttattgagatacggatggaaggagagggcttatgtttcgttggggcattatttttctggtaatagcgttgattgctgcggcgctgggtttcggtgggttagccggtacggcggcctgggccgccaaagtggtattcgtcgtcggtatcatactcttcttaatcagtttgtttaccggacgtaaacgtctttagctagcgtaggaagatttttacattcttgtttttatgctggaaagccgctgtcattaacagcggctttttaatgggccaaatgaagctatttaagaaaccaccaatagcgaattaagacgacatcattagcaaaaagagtctgtttttccgatgttaatcggtgatttactgggcgtaaaactggctatcagcaatgattctttacaagaagattaacgaaagcgcgtaagacaagctattctcggggtctattgctactcactaaggatggatggtgggacacagaatacctatcacgctgggcaatattgagccattagcgtacaaaccctatcagcccgggaaaatggcgttggtatgtgaagggggcgggcagcgggggatttttaccgccggggtgctggatgaatttcagcgagcccgctttaatccattcgatttaatgataggtacttccgccggtgcgcagaatctatccgctttcatctgtgaccagccgggctatgctcgtcgggttatcacgcgttataccaccagtgcgaatttctttaatcctttgcgctttgttcgtggcggccacctgatcgatctcgattggctggtcaatatcacctctgagcaattgccgctagctattgatcatgcggaaaagcatttgtccaatggacgtgaattcttgatgtgcgcctgccgcagcgatgatttcacgccgacttatatcgcgcccaatagagaaaactggctgccggcgattaaagcctccagcgccattcctggattttatcgttcaggggtggaaatggatggaatcagttatctggacggtggtatcagcgatgccataccggtggaggaagctcatcgtcgcggcgcagataccattgtcgtgattcgcacagtgccttcgcaaatgtattacaccccgcagtggatgaagcgcatggagcattggtttagcgaaagcagcctgcaacaaatggtgcgaattatgcagcaacacgagcatagctatcatcgcattcaaaagtttattgaaaagccgccggggaaattacgggtgtttgaaattttcccacctaagccgctagccagtaacgctttgggcagtaaaatagcttcgctaaatcgggattatcatttgggacgccgctgtggtcgttattttttagcaaccgtgggccactggttattgcctcgagataaaaggccggatgataagagtaaggtggttttctctcgtcgtttaattaaaccccgccatgacattcagcctgaaattgtagcctcgtcattgctgactgaatcgggtcaatttgctgaaacggggaaaatcttacccgccgagaatatgccgttagcaaaggggcttattttaccggctaagcttagaaataaagtggcgcaggtgatttctgatttcactccaccggtcaaagcaaaaaaatctaaaggtgataaggcgtaatgtcaggttctaacagcagcgcagcttattttattgatactcactgtcatttcgattttccgccgtttagcggagcggaggtggctagtctgacatcggctgcgcaggcgaacgttcggcaaatcattgtacccgctgtagaagccgaatatttcgatcgcatacaggctttagctaatgattatccggcgctgtttgccgctctgggaatgcacccgctgtatatcgacaggcatcaggagccgcatctgactttactggatcagcggctgtcgcagagatcgccaaaagtggttgcagtgggcgagattgggctggatctgtatatggaaaatccgcagttctctcgccaattggcgttattacaagcgcagcttaaattagctaaacggtatgatttaccagtgattttgcattctcgccgcactcacgatcaactggccgcggcgctgcgtaaagccgatctgccgcgcaccggtgtagtacatggttttgccggcagtctggtacaagcgcaggcgtttattaaattaggctattacatcggcgtgggtggcactattagctatgagcgagcgcagaaaaccagaaaagtgatggccgagttaccgctggaagcgctgttgctggaaaccgatgcgccggatatgccgctggccggttttcagggacaaccgaatcgccctgaacgcacggcggacgtgttcactgtgctgtgtgaattacgatccgaaccagcggatgtcattgcgcagcagctttatgccaacagtgtgcgtttgtttaatcttcctccggcgtaatacctttcatttcaccgcgcagttgtgctgactacctccattcatccccgagacttagtcggctaagctcccaaccactcactcagctgccgcgtggctgcaacgaaaaatgaacggatggctaacaacgggctgaacgtcattgaagcccctgaatgagttacttagcgtggtaacatcctaactactaataacggctataattatgtgaatctgatcacgtttccagtcatttggttgcttctttgtgtgtttatttgtgacagggattgtttgcgatttgagccatgacgctataatccccccgaattcaaaaaagaaatatgtggtctgaacgcatattaaatcgtgtcattctccatttaatacatacacagggaacatcagatgcaacccatcatgagtttggtcgggatggcggtactgatattaattgctgtcttactctcgagtaactttagggctattaatatccgcaccgtcgtaggcgcttttattatccagattggcgtcggagcattggttttgtatgtgccgatcggtcgccgtattttgggcggaatgtccgaaggcgtagcgaatgtgatcgcctatggtaacgaagggatttcatttattttcggcggactggtctccgacaagatgtttgaagttttcggcggcggtggctttgttttcgccctgcgcgttctgccggttatcgtctttttctcctcactgatcgcggtactttattacctcggaatcatgcagctggtgattcgcgtactgggtggcggcctgcaaaaactgctggggacttcccgcactgaatccctgtcggctaccgcgaatatcttcgttggtcagacagaagcgccgttggtggtacgtccgtacatctctaccatgacacaatctgagctgtttgccgtgatgtgcggtggcctggcgtcggttgcgggttcagtattggcgggttatgcgcaaatgggcgtgccgttggaatacctgattgccgcgtcctttatggccgcgccaggtggcttgctgtttgccaaattgatggtgccggaaactgaaaaaacgcacgatcacgaagatgcaaccaagctgattcctgaagccgatcgcccagcgaacgtcatcgatgcagcggcaaccggtgcggcttccggtatgcaattggcgttgaacgtgggtgcaatgctgttggcattcatcgcgttaatcgctttgttgaacggcattttaggcggtattggcggctggtttgattatccgcagctctcgctggaattgattctaggctgggtattctcgccaattgctttcctgattggcgtgccgtggagcgaagcgacggtggcgggttcctttatcggtcagaagattatcgtcaatgaattcgtggcctttatgaacttcggtcagtatttgaaagccgatgagttggttattgccgctggtttgccagtactttccgatcataccaaagccattatttcttttgctctgtgcggttttgccaacctttcatccgtggcaattctgttgggcggtctgggcagcatggcgccgaatcgccgtcatgacattgctcgtttcggtttgaaagcggtggcagcagggactttatctaatctgatgagcgccaccattgccggtttcttcctggctctgtaattcatatcgatttgtaaaatataatattctgcaaaggtagattgtttgtagaatagcgtgctggcggggacggttatcacccgccagcctgtttttcccttccggtgactcaggccgtttgtgcgtattgtcatcaccgtcgtcgcacggaattagatgaataggctattcttgatgcgagagcgaaagatagtctgcacttatcgataaatcaggttattttgtgactcaattcacatataattcagacctgttacaaataactattaattaatgtgagtattaacacatctcatttgagcgcttcatgctcaaatagagacagctggcttttcttgtggaaaagctaagtgcggtgagatggatctcagttgccgctgcgggagcaaatcccaagggcgctatcttcaaggaaccaagtccgctcgccaacgtgttgagctgcatggcctggaatttccataggaaattgccgtcagttcataaatgaatgctcggttttggcgcggtgccgaagctgaaatagagttggagagttttatgaccgatttaaccgccagcgcgaaacgtgcgctcagtttgatggatttgaccactctgaatgacgacgataccgatcaaaaggttatcgatctttgtcatcaggcaaaaacccctgcgggtcatactgcggctgtctgcatttatcctcgttttattccgattgctcgtaaaacgctacgggaacagggtacccctgagatccgtattgccacagtgaccaatttcccgcatggcaatgacgatatcgacattgctttgaccgagacccgcgcggctattgcctacggcgccgatgaagtagacgtggtgttcccatatcgcgcgctgatggctggtaacgataaagtgggcttcgagctggtaaaagtgtgcaaagaggcctgtgccgccgccaacgtattgctgaaagtcatcatcgaaaccggtgaattgaaacagcaacatttgatccgtcaggcttctgaaattgcgattaaagcgggcgctgatttcattaaaacctcaaccgggaaagtaccggtgaacgcgacgctggaaagtgcggaaatcatgattcgcaccattcacgatttgggcgtaggcaaagaagtcggcttcaaacctgctggcggtgtgcgtactgcagaagacgcggctgcattcctgaaactggcggacggtatcatgggcgaaggttgggcggatgcgcgccatttccgcttcggtgcatccagcctgttagccagcttgctgaccactttaggtcatcacagcacagccaaacccggcggttattaattattgcagatgcacgacgggcactgcgcccgccgtgttgctattgctgaaaaggcacaatgcgcttttcgatttcccattcaggtcaagcagggggatgccttgtttctggcacaagaaattattcgtaaaaaacgcgacggtctgccgttgagcgaagaagaaattcgtttcttcatcaatggtattcgcgacaatgttgtttccgaagggcagatcgccgctttggcgatgaccatttattttcatgatatgagcatgcctgaacgcgtggcgctgactatggcaatgcgcgattccggtaccgtgctggactggaaaagtctcaagctgaatggccctattgtggataagcattctaccggtggcgttggcgatgtgacttcgttaatgctcggcccaatggtagcggcttgcggcggttatgttcctatgatttcaggccgtggcctgggccataccggcggtacactggataagctggaggccattcctggctttgatattttcccggatgataatactttccgtaagattattcaggatgttggcgtcgcaatcatcggccagaccagttcattggctccggcggataaacgtttttacgccactcgcgatattactgcgaccgtggattccattccgctgattaccgcttctattctggcgaagaaactggcggaaggcctggatgcgctggtgatggacgttaaagtcggttctggtgcctttatgccaacctatcaactgtccgcagatttggcgcaggcgattgtcggcgttgccaacggcgcgggttgtaaaacaacggctctgctgactgatatgaatcaggtgctggcatccagcgccggtaacggtgtggaagttcgtgaagccgtacgcttcctgaccggtgaatatcgcaatccgcgcttgctggaagtgacgatggcgctgtgcgtcgaaatgttgctttccggcgggttggcgaactccgaaaccgatgcgcgcgctaagctacaggcggtattggataacggtaaagcggcagaagtctttggtcgcatgattgcggctcagaaaggcccgactgatttcgttgaacgttacgacagctatttgccggtggcgatgctgagcaaaccggtctttgcagaaaaaccgggcattatcaccgcgatggatacccgcgcgctggggatgtctgtggtagcgctgggcggcggtcgtcgccgtgctaccgattcaatcgactacagcgttggcctgaccgatatggcgcgtctgggcgataaaatggatagcgaacgtccgttggcagtgattcatgccaacaatgaaagtgactggcagcaggcggctgatgcagtacgcgcggccatgacgctgggtgacaaagcgttagaacaaacgccggtggtttatcgtcggattaccgaataagctttctttattcactacgaatttggcgcagtaaggcatgttggccgtactgctcccacagcgtgagttcacgcaggagaaaatgatgaaacgtacatttattatggtattagactcatttggtatcggtgctagcgctgatgctggcaagtttaacgatgaaggtgccaacaccctcggccacatcgctgaagcctgtgcccgcggtgatgctgatattggacgtaaaggcccgctgacgttgccgaacctgagccgtttagggctgggtaaagccgctgaagaatcctgcggtactttccctgtgggtctggataaagatgctgacatcattggtgcctatgcttacgccagcgaattatcttccggtaaagacactccgtcaggccattgggaaattgcaggtgtgccagttctgtttgattggggctatttcagcgacgttgagaacagtttcccgcaggaattgctggataaactggttaagcgcgccaacctgccgggctacctaggcaactgccattcatccggtactgtaattttggatcagttgggcgaagaacatatgaaaaccggcaagccgattttctatacctctgctgactcggttttccagattgcttgccacgaagaaactttcggactggatcgtctgtatgagctgtgtgaaatcgctcgcgaagagttaaccgaaggcggctacaacattggtcgcgttatcgctcgtccgtttatcggcgacaaaccgggtaacttccagcgtactggtaaccgccacgatctggccgttgaaccgccagcgccaaccattttgaaaaagctggttgatgagaaacagggtgaggtggtttctatcggcaaaatcgccgatatctacgcacacgtgggcatcactcacaaagtcaaagctaccggtattgatgctttgttcgacgctactttggaagaaatgaagaaagcgggcgataacgccatcgtctttaccaacttcgtggatttcgactcttcttacggccaccgccgcgatgtggcaggttatgccgccgcgctggaactgttcgatcgccgcttgccagaattgctggaattggtgaaagatgacgacattatcatcttcaccgctgaccacggttgcgatccaacctggccgggtaccgatcacacccgtgagcacattccagtgctggtttacggtcccaaagtgaaaccgggttctctcggtcatcgcgatactttcgctgacatcggccagaccgtcgcgaaatattttgatttgtcaccgatggattacggcaaaccaatgttttgattatctgcgtcggaccgtttatggcggtcgaccggtgattttatttaatatttttgatttataaggaaaataattatggctacgccacatatcaatgctgaaatgggtgattttgctgacgttgtcctgatgccaggggacccgctgcgagcaaaattcatcgcagaaaccttcctgcaagacgtgcgtcaggttaacaatgtgcgtggcatgctggggttcaccggtacttataaaggccgcaaaatctcggtaatgggtcacggtatgggtattccatcctgctcaatctacgcgaaagaactgatcaccgatttcggcgtgaaaaaaatcattcgcgtgggttcatgtggcgcagttcgtaacgatgtaaaactgcgtgacgttgtgattggtatgggtgcctgcaccgattccaaagttaaccgtctgcgttttaaagatcacgattatgcggctatcgctgatttcgatatggtgcgtaacgctgttgacgccgctaaagccaaaggcgttccagcacgcgtcggtaatattttctccgctgatttattctatacgccagacccacaaatgtttgatgtaatggaaaaatacggcattttgggcgtggaaatggaagctgccggtatctacggcgtagcggcagaatttggtgctaaagcgctgactatctgtaccgtttctgaccatatccgtaccggtgaacaaactaccgcagaagaacgccaaacgaccttcaacgacatgattgaaatcgcgttggaatctgttctgctgggcgataaagagtaatagcccgggctacaatttcttctgagccgcacactccgctgcggctctttttttatcaatactttctgtttctctgtttctttctatatgcgtcaacaggttccagatatcacccctgaacattggctacaagcgcagcgtttggttgagatattttggcttcgagtggctgatcattcagctatctgtttggaattcagtgcgatagcattgccaaatgcaggaaaagttggctcactcacgccacgtatccaacgcatggcctgaacctactttttgacctgcgattcctcggttctttccgtagatttgctggcagttgaatccgcattggatgattcccctgattcgctgtcttcttctaccggcgtattggcagtgagcagataaggcgattgctgccagcggctacggcgatgctgcaataaggttctggccagaataataccgaccgccagcgcgaccagaatcattaaacgcagtaagttggtggtgttatccacctgcttggattcggttgccagtacgtgggtatccaacgtcatgcgcaaaaagccgctaggcccgttcttgccgggaatcatctccacaatctgatgattgaaataactgccggggcgtttgccgtccagcgccaaccggtcacgcactttgactttttcgccagaatccgcgaccaaagtgccgtcaatcaaatacacactggcatccagtatgcgactcgcctgcgtcaactgtttcaggacttcatcgaccttctggctatccacgtcgtcattgttgctatccataatcggagacaggctaaaagccacctgtttcgccagcgttttcgccagctcttccacctgttcggagcgtgccaactggtggctgaggctgaaataggatgcgccctgcataagcagcacaagcaaagctagacaaatcagtacgatagcagtgcgatgcagtcgaaattttaatttagcccgggccatgcaggttccttacgcgttttgatgactttatgttgccagaagcaaggacgataggatagcttgatgcatcgtttttacccttcatctttctcgctgctgcggtgttggctgcttttgctcaccccagtcgcttagtgggctaagctcctgaggattcgctcagtcgctgcttggccgcaacgagaaattattgggcttatatcgcagctttgctgtgatgtgaggctattgggtatatattgccgattctgggtttctacaggagcttttcatgtcaaatagtctgacctattgcgatctccccgcggagatttatcagtggcccggtttgccgctttctttgagtggtgacgaggttatgccgctggattatcgtgcgggccatacgggttggctgttgtacggcagaaagctggataaacaacgtattaccgattttcaacgccgtttgggcgcggcgatggtgattgtctccgcttggtgcgtcgatgactatcaggtgattcgtctggctggtagcctgacaccgcggattaaaacgctggcggacgaaagcgggctcgatgtggctccgctaggcgcaattcctcatttgcgtacgccgggtttattggttatggatatggattccacggctattcagatcgaatgtattgatgaaatagccaaattagccggcgtgggcgacgaagtggccgctgtaaccgagcgggcaatgcaaggggaactcgatttctctgccagcctgcgtcagcgggtaggtacgctgaaaggagccgatgccaatattctgaaacaggtacgcgatactttgccgctgatgccggggttggtcacgctcgtgaagaaattacaggcgctgaactggcatgtggctatcgcttctggcgggttcacttattatgcggaatatctgcgggataagctgcatctggacgcggtagccgccaatgagctggaaatccgtgacggcaaactgaccggtcaggtgctgggcccgattgtcgatgcgcaatacaaagccgacacactgattaaactggcggaaaaactgtctattccgattcagcaaaccattgccatcggcgacggtgccaacgatctgaaaatgatgcaggcagccggtttggggttggcgttccatgctaagcctaaggtttatgctaaagcgaaagtggcgattcggcacggtgatttgatgagcgtgctgtgtattttaagcggcagtctgaagcacgaagaacgctaattccctacgtttctggcgtgctcgctcagtttgccgtcacgccagtaaaccgtaggaaaataggcggttacaacgctaaaacctattgaattttaaatttattgttagatcgtaatacagaggaaaagacgtggctaaagcaccaaaacgcgcatttgtttgtaatgagtgcggcgcagattatccgcgctggcaggggcagtgcagtgcctgtaacgcctggaataccattaccgaagtgcgtctggctgcggcaacgccttcttcgcgtaacgatcgcctcggtggctatgcgggcgaggcgggtatcagtcgggtacaaaagctgtcagatatcagtctggaagcgctgccgcgtttcaccaccggcttccttgagttcgatcgggtgttaggcggcggcgtggtacccggcagtgccattctgattggtggcaaccccggcgcggggaaaagtaccctgctgttacaggtattgtgcaagctatctgaaggcatgaaaaccctgtatgtcaccggtgaggaatcgctacagcaggtggcgatgcgagcgcatcgactcggtttgcccaccggtaatctgaatatgttatcggaaactagcatcgagcagatttgcctgattgcagagcaagaacagcctaagctgatggtgatcgactccattcaggtgatgcatatggccgatattcagtcctctcccggcagcgtggcgcaggtgcgtgaaaccgccgcttatctaacacgttttgctaaaacacgcggcgtagcgatagtgatggttggtcacgtgactaaagacggctcgctggccggtccgaaagtgttggaacactgtatcgactgttcagtgatgttggatggcgacggcgattcccgcttccgtactcttcgcagccataaaaaccgctttggtgcggtgaatgagttgggcgtttttgccatgacggaacaagggctacgtgaagtcagtaatccatcggcaattttcctcagccggggtgatgaagtcactgccggtagctcggtgatggtggtgtgggaagggacacgtccgctgttggttgagattcaggcgctggtggatcattcgatgatgtcgaatccgcggcgagtagcagtaggattggaacagaatcgactggctatcttgctggcggttttacaccgtcacggcggcctgcaaatgtcggatcaggatgttttcgttaacgtggtcggtggggtaaaagttacggaaaccagcgccgatttggcgttattaatgtcattggtatccagcttgcgggatcggcccttaccgcaggatttagtggtatttggcgaagtcgggctggccggtgagattcgcccggtgcccagtggccaggagcgaatttccgaggcggcgaagcacggttttaagcgagccatagtgccgcacgccaacatgccgaagaagcctctgccgaatatgcaggtatttggcgtgaaaaaactggccgacgcgctggcggttctagaggatctttaagctgcatttagtcgtgttgtttgagcagcatactgtgttatttttgtttagcgtgctaaacaggaggcagtatgctgcagttcgattatttaaaaacggcaatcaaacagaaaggctgcacgttacagcaagtggccgaagccagtggcatgaccaaaggatatttaagccagctacttaacgataaaatcaaaagccccagtgcgcaaaaacttgaagccctgcatcgttttcttgggttggaattccctcgccgcgagaaaaaggtcggcgtagtgtttggtaaattttacccgctgcataccggccacatctatttgatccaacgagcctgtagccaggtagatgaactacatatcattctgtgccacgacgaacctcgggatcgggaactgttcgagaacagctccatgtcacaacagccaacggttagtgaccgtttgcgctggctgctgcaaacgttcaaatatcaaaaaaatatccgcattcactcatttgatgagcacggcatcgaaccctatccgcacgggtgggatgtctggagccgcggcgtaaaggcctttatggcagaaaaaggcatagtgccaagctttatctattccagcgaaagtcaggatgcgccgcgctatcgcgaacagtttggtatcgaaaccatcctgatcgatccgcagcgttcatttatgaagatcagcggccgtcagatccgccgtgatcctttccgttactgggattatattcctaccgaagtcaaacccttctttgtccgtacggtggcgatcctcggcggggagtccagtggaaaatcgacgctggtgaataaattagccaatatattcaataccaccagcgcctgggagtacgggcgggattacgtattttcccatttgggtggcgatgagatggcgttgcaatactcagattacgacaaaatagccttggggcaggcgcagtacgtggatttcgcggtgaaatacgccaataaggttgcatttatcgatacggacttcgtcacgactcaggcattttgtaagaaatacgaagggcgggagcatcctttcgtgcaggcattgatcgatgagtatcgcttcgatctggtgattctgttggagaataatactccgtgggtggccgacggtttacgcagtctggggagtacttccgatcggaaatccttccaaagcctgctggaagatatgctgagagccaataacgttgaatatgttcacgtggaatcggcagactacgacgagcgcttcctgcgctgcgttgaattggttcagcaattgctggccgccgatccactgcgattatcccgctcaccgatcagcgagcggaacagtctgcagaatgataattaataagcgataaccagcttgccctgcatgcgtccagtcagtactttttggtgcgccgcgtgcagggtgtcagtcgtcaggccgtgtaaagtatcactcagcgtgccgcgcagttctcctgcgtcgacatattgagcgacctgtttcaatatttctccctgttgcgccatatccggcgtgttgaacatgctgcgggtaaacatcaattcccagtgcagagcggcacttttcagtttcaacgcgctttgatcgaggggatgagtattttccacgatggtgcaaatgtggcccatcggtgcgatgaggtcgccgatcgtcgcccagtgaccgtcggtgtcattcaggcagaaaatataatccaccttatcgatcccattactggccagttctccttttagatcgcgataatcgacggtgagatctgcgccgcgatccagacaccagcttgcagagactgggttcgaggctgtggcgatcacgttaacctgactacgcagcgccgccagtgagatggctatcgatcccacgccgccggcaccgccaatgatcaacagggttttccccgctggcgcttcctgaatttttagatgctcaaatagcccttcccaggcggtcaatgcggtcaacggcatggcagcggcttctgcccagttcaggcgattcggtttacgcgccacgatgcgggcatcgaccaattgatgcgtggcgttgctgccaggacgcgtcagatcaccggcataccagacttcatctccaacgctaaaaccctgtgtcgagctacctacgccaatgactacgccgctggcatcccagccgagcactcgcggctgctgtaagccatttttttgtagaccggcgtggactttggtatccaccggattaaccgatgcggctttcacttccactaagagatcgaaagcactgggcgttggctgatcccacgggatctgaatgaaatcggcgggtttctgcggattaactgcaatagcgtaatgagacatagcctagctcctttttaggtagaccttgagtttagatccgattgactagagtgataagatggacaatcaataactcagtgttcgtctatggtgaacaattatgtttaagcagctacaggatatggcgctgtttgcgcgagtggccgaatgcggcagttttaccaaggcggcggccatcgccggtttacctaaatccagcgtcagtcagcggattagcctgttggaacaccggttgggtatccggttgctgaatagaaccacgcgtcagatcagcctgacgttcgccggtgaacgctatttggttcactgtcaggaaatgctacaggcggcggagcgagccgatttaaccctacagcgcttgctggataatcccagcggccgactgcgagtttccagtccggcagggctggccgccactttgctggcgcggattgccacggattttcaacgacaatatcccgatgtttctctcgaggtattggtctccgacgttaaagtggatttggtggaagaaggcttcgatgtggcgttgcgcactggaaaaccgcaggattcttcattgattggacgccgcttgggctatgcgccccgcaatttactggcttctcctgattatctgactcaatttccgccgattttacatccgcgtcagttggaggaacatcgttggattacccaccgcgcttggccagaactggtattaaatcatcaggatgaatatttccgttggcagttacctaagctacacgtcaccgataatttgctctacgccattgagtgcacactatcggcgggtggaattaccttgctgcccgcttttcttagtcgcgaaaaggtcgcgcagggaaaattagtggaagtgttgcctgaatggctggccgaagggaatgaactgtatttggtttatcccagccggaaattaaattcaccggcattgagctgttttattgatgtggttatggggcatccggtatttacccattatgcccaaggattaacgtaatatttttggtgcgttggctaagtgagagcattactttgcggcagaagtgggaagcgcaacaatatcgttaaaatcggtcccaaaccaatagacgccataatcgctccagtgtgggccttcaataaaatccatcagcgaaacctgttcggtgtgaaaaacctgaccggcctgattttcaattttaatgtagccgctgtaatgagagccgtcgccgggcgagccaatagagggaatcaattgggtaatcttataaaagcgcataacgtattgatgattgggactccattcttccctgaccagagtgccttgttgccaccaaaaatagactgctccacccagaataaacaaaaatagcgtccatcggattttgcggattcttattaattttttcagtgcttcagagattgaatataatttcatttgctatccatgcgtcaggctaaaaaaatactgcccaccaaggtgagcagtatttagcagtgaatgacgaattacttggtcattttcttgtacttaatacggtgcggttctaaggcatcagcgcccagcgtccgctttttccactcttcgtattcagtaaagttaccttcgaagaattctactttcccttcatcctgataatcgatgatatgggtagcaatacggtcgaggaaccaacggtcatgggaaataaccatcgcacagcccgggaattccagtaaggcgttttccagtgcgcgcagggtttcaatatccaggtcgttggtgggttcatcgagcagcaacatattgccgccaacctgcaacaattttgccagatggatacgaccacgctcaccgccggacagctcgccgatgcgtttgccctgatcgacacctttgaagttaaagcgaccaacgtaggcgcggcttggcaattcaaagttaccgatcttcatgatgtcctgaccgccggaaacttcttcccacacggttttgctgttatccatgctgtcgcggaactgatcgacagaggctaactgcacggtttcacccaaggttatggtgccggaatcaggctgttcctgaccggacaacatacggaacaacgtagatttacccgcgccgttcggcccgataataccgacgatggcgcctttcggcagtgcaaaggtcagatcgtcaatcagcaggcggtcgccataggatttgctcaggttctgaacttccagcactttgtcgcctaaacgtggaccaggtggaatgaacaactcgctggtttcgttacgtttttggtattcaacgctgttaagttcttcaaagcgagccaaacgtgccttgcctttagcctgacggcctttcggattctgacgaacccattccagctctttctcgatagatttacgacgagcggcttcggaagaggcttcctgcgccagacgagcgtctttctgctccagccatgaggagtagttgccttcccacggaataccttcgccgcggtcaagttcgagaatccagccagccacgttatccaagaagtaacggtcatgggtaatcgccacaacggtgccttcatagtcgtgcaggaagcgctccagccaagccacggattcggcatccaggtggttggttggttcgtccagcagcagcatgtccggtttttccagcagcaggcggcagatcgccacgcgacgacgctcaccaccggacagattggcaattttggcatcccaaggcggcagacgcagcgcatcggcagcgcgttccaactgattatccagattatggccatcgtgagactggataatcgcttccagctcgccttgctctttcgccagcttatcgaagtcggcgtctggatcggcatacagcgcgtagacttcgtccaaacgagtcagcgcgcgtttaacttcgctaacggattcttctaccgcttcgcgtaccgtttgttccagattcagttgaggttcctgcggcaggtaaccgattttcaggcctggttgagcgcgcgcttcgccttcgatgtcggtatctacaccggccataatgcgcaacagggtagatttaccggaaccgttcagacccaatacgccgattttggcgccggggaagaagctcagggagatgtttttcaaaatatgacgcttcggcggaaccactttgccaacgcgatgcatggtatagacgtattgagccacgttgctctagcctctctatatcagtttttattaggatgtctggtgcggagtgtagcccgtttcgataacggatcccatacatccttgaagataacggagtataacctttttgcgggagaggcgggctgaccgcccccacagaatgggcttattcaggtatcagggcgcggtgacgaccattgccacgcgacggttttcggctcggcctttggccgtgcggttatcggcaaccggatttagcttaccaagcccgcgaacttcgatattggctttcggcataccgatggaagtcagggtatttgcgacggcgctggcgcggccataagacagttggttattgtaactatcttcacccattgaatcggtgtgtccgtccagacgaatatggctgataccaacgtccatcaaggcgtggccgattttctctacggtttgctctccctgagcattcagtttcccaacgttgctgctaaatagcaccttatctgacaggccaaattcccaaccgttgtccgttagtttgaatccctgttcctgtagagccgctatttgctccgctgtcagaccctgaggcttattctgacaacccgctagcagcaataaccccaacgccatcaagccaatccacaggctactcctcaacttttgcattgtaagaccttattcttttacgctgtgtatgtcaggctttggggcagaatcacccggccgcctccatgataattgttcttcgccaaatacatggcctcatccgcacgctgtaacagttctactggcgtttgcgcgtgttccggatagaacgcaataccaatactgattgatgttgtgatatccgtgccgtcaggcagtgtaattgggtgagccatacaatgaatgatattgtccgcgatcgataatacatcatagctattgccgattgacgtcagtagcacggcaaattcgtcaccgcccagacgagcaacaaaatcagtttcacgtaattgcgaacggatacgttcagccatggtgatgagtacgacgtcaccggcggcatggccataattatcattaatctctttgaaactatcggcatcgaggaacatcaatgccaccatatccttatcagcgcattcattgagcgtgcggttcaggctgacttcaaaaaaggcgcgattggcaagcccggtcaggctgtcatgagtcgctctatgggtcaggaaatcattttcctgcgttaaatgtgcctgccagacttccagctcttccagcagcccattgaaatcgttacttaactcattaagttctttgatatgagccgatggaactctttggccaaagctacgatgcaggctcacatcgtgcgccacttcggttatacggttcagcgagccgacaattctgcggagcattcggcgagaaaggaacagggcgactagcgtgctggcaatgataccggctagcatggcaatcaccccgcgcaacaggaaactgagcaggctgccgccgtggccgacaataataatggtacctatgcgttcaccgctgtgcatgataggcagttctaccgggccactcagtgcccaatgggcaacgctttgctctagctggtggaacgggccgtgggcgggtagcgaccaactggctattagcttgccattggcatcaactattttagcctcggccacctcttcgctggctgcaatcaacgccaatgattcattggcggcaatattatcgccgaaaactacggcggcttcggtggtatagctaattgaacgggcgatcaaatgcaggttgtggtcggcgtaaacacgcagggaaaaaatggcaaccagagtaataaagataccagccatccccacggcaaccagagccacggttaaatgtatgcgttgaagtattttccctaagctaggtaattttacacgacgtttatttattcttttaatcagtctcataaaccatcagccttcttacgggcgagttgcagtacgctcggatgaacacgaactcctgtacgtgctaacgcatccatattaaccttaaaagatgcctggttatcttccactaacagacaaaaggcgctgccggtggcgcattcagaataatcctcactgattgtcagtatcggatgaccttgagtgcgattaattaactccaaccgctgctctgcggtggcacttcccaaataaatagcatcgcattggcttgaaatagccgggctggcaaacgggaatcgctcgactttaattggatgttgcgttgccattaacgccgggttaaacaggccttctgcatagttggtcggggcgacaacacataacctaatgacctgcggagtcaccggccagcgggcatagctgataatccccaaaaccattttggttgcggcatctgtccgcgcctgtatcacgttcgcattggcaggttcttccgccgatctggcgccggtagaaaatacgaacgtaaatacaatcaatagatactgacaaatacgcccaaaatgccagggaggcataacgtattgatcattcttactgacgccgttgattgcgcaagtcgaggtggtcatttttgcgcttcctgtggatcggccccggaaatataaacaggcaacatagtcagtgagaaaaagtcattttattatcggcgcttagatttaccgtttttattctctctgattgtattacaagatcacattgttgcaatgctcgtcatggtatcggcagggcagggaattttcttaaatattttcatttcagggaaaaaccgcccggttttaacaccgggcggagaaagaaagcgggaaatggtcaaacagactttatggaaggtttaaaacgctggataacccatttctctatttcaacaataatgaagatggcaagacccaccagtaatgtcaggccccagtaataggctggcagaggttcggttccaaaggctgtgttcataaacggcagatagataattgccagttgcagcaagattagaacgccggaaaccagccacagacctttgttaacgaacaactctttgttcagcgggaagcgatccgccacgcggcagttaaacatgtaaatccactgcgcggtaaccagcgtttgcatgagcactgtacggataaattcggtgctgtaacctcgaggttccagataagcttccagaataaaggcactgatagcaatcaaagtaccgacaaaggcgatacgccagatagcgtggccgtccagtacatggcgcgaaggatctcgcggattgcggttcatgatgcctctttctgccggttcaaatgccagaccgaaagaaagcgtagtagaggtcgccatattcatccacagaatttgcagcggcgttaacggaatgaccgccccggcaagaatggcaaagatgattagcagcccctgcgccaggttggttggcaggataaacaggatggttttcttcaggttatcgtaaacccgacgcccttcttctaccgcactggcgatggtggcgaagttatcatcagagagcaccatatcggcagcttctttagtcacttcggttcctttgatccccatcgcgatacccacatccgcctgtttcagcgccggtgcatcgttgacgccatcgccggtcatgccaacgatttcacctttggtttgcaacgcttttaccagacgcagcttatgctccgggctggttcgggcgaagatatcgtaacgaaccgcggcttcggccagttcctcatcgtccatatgttccagctgactgccggtaatggaatccgtgccgttgcctattcccagcatcgcgccaattgccatggcggtttcctgatggtcgccggtgatcattttcacgcgaataccggcctgctggcaggtggctatcgcatcaatggcttcagggcgcggcggatccatcatgccggcaataccgacaaacaccataccctgttgaatatcggcatgatccagtttgctaatgccctcgtcagtaggtcggaacgccgcagccaccatacgcaagccctgcttggcgtagcgagccatttcagcttcccagtaatcgcggcggaacggagcgacgccgtttgccgtcagttcctgctggcagaaggtaaatagtacgtccggcgcgccggtcaggaagatgctgttttccgactgaatctgatggctggtggccatatatttataagcggaatcaaaaggaattttaccgagttgattaacctgacccagctcaatgccggatttcgccgccagtacttttagcgccccttcggttgggccgccggtaatcacccaatgaccctgatcgtttttctggatctggctgtcattacataaattcaccgcagtgatgaatgttttcagcgttgggtttgcagctaaatcggcctgctggtcgctgccttcctgataaatattgccaacgggctcatagctttcaccttcaacgcgatagcaatggtcggccaaaattaccgctttcacggtcatttcgttcattgtcagggtgccggttttatcggaacacaccaccgtcattgcacccaaagtttctaccgttggcagcttacggataatcgcccgtttacgcgccatggactgaacgcccagcgacaaaataattgagataatcgccggtaagccttccggaaccgaggccacggccagactgatcagcgccagcaacagttcatcaaccggcaggtcgcgtaggataaaggcaaaaacaaacagtacggccatcatcaccagaatcaggatgaagatagctttaccgaggcgatccatttgctgcagtagcggagttcgggtcgattcaacggtagacatcatctggttgatatgacccagctcggtgtcaccaccggtggcaataaccacgcctttggccgtaccggcgctaatggtggtaccggaaaacagcagatttttacgatcgccaataacggattcgctttctatgactccggtttgtttttccaccaccgtcgattcgccagtaagaatagcttcttcgatctgtaggttgtggccctccagcaaacgcaggtcagcaggaattttgtcaccgggtttcagggtaacgatatcgcccggcaccagatcttttgcatcaatggtttgcgtaatgccatcgcgaataaccacggctttactggaaagcatgttctgaatgcttttcagggatttctcggccttattttcctgaacaaaaccgatcagggcgttaatgaccgcgacgcataagatgattatggtatcgacggaatgccccatcagtcctttaaccaaggctgcggcgagcaggatataaatcagaacatcattaaaatgggcaaggaattggaggaggggatgcttgcgtttcttttctggcaaggcattaggcccgtgcttttttaggcgttttgctgcctcctgctggctcagaccttctgtagtggtattgagctgctctaagctctcatccgtcgtgagctgataccaggttttgcccgatgggggcggcgaggctgacttttggtttggtgtgttatgcattgaaggaaccttctccaaagaattaataaatctaaaattagccgtccttgtgtcctttatttaccggaaaataatgccggtttaacgtcaagccaaaataccttttgccttacgctgtgaacacctataagttaattatttgatttttaaataaaaattaaatgctaatgggttgaacagaaacagtgaaacagcatagttatagtgaggaaggatagtagataattatcagtttactgccttgatctgagataataaaaattaagtaacagaatgttcctataggcgcagaacctgagtttaggcgcgatttttgctactgatatctctacagttacttgcgttatcgctaaaaaatttaacacccaatctctcagcttcattggtaatttatttcgttcagcggataagatgaatatgaatagccactattataaaaaggttattattccgttcgtattcctaattatgtgcttatcttcattaagcaaaacgtggattcttcataataagaatatctgcaaaagtgggtaaagacgctggaacatagtggcatatcgagcgaaactctcagccagcctgaatttgaagctctgaactaattatgactatgctaatcagaagatccggtgaatatgacgtacagccaacaaccagtgaggaaacagtaagtatggataagtggcgatacctggcgattggcgtgtgtctggtgacagcatcaggagcggcgtcagcagattctcttgatgcccaacggcagcgctatcaacaagttaaacaggcgtgggatagcaaccagatggcaacggtggaacagctgttaccaacgctgcgcgattatcctttgtatccctatctggaatatcgtcagttgacgcaagatctcggccaggtcagcgcggcacagatcagtgatttccttaaccgtaatccaacgctgccgccagcgcgttcgttatcctcgcgttttgttaacgagctggcgaaccgtgaagattggcgtgggttattgagctttagcccacagccaccgaagccggtagcggctcgttgtaattattactatgccaaatgggcgagcggcgagcagcaggtcgcctgggacggtgccagcgaaatctggttgaacggccagtctttaccgggtagctgcgacaagctgtttacggtttggcagcaggcagggcaccaaacaccgctggcaacgctggcgcggatgcgtttggcgctcaaggaagggaatgccagtctggtcaacttcttgctgaaacaattaccgagtgattatcaaaccatggggacggcgctggcgaagttacagagcgatccggccagcgtggaaagctttgcccgcaccgtagggccgacagattttacccgttctgccaccattattgcttttactcgcttagcgcgtcaggacgtggaaaacgcccgcgccatgattcccacgctgacacgactacagaagatgagcgagaaagataaactggagctggaagaggcggttgcctggcgtttgatgggaaatgatgccacttacgagcaggcgaaatggcgtgatgaagtcacgttgcgcagccacgccacgccgttgcttgaacgccgtattcgcatggcgttaggcaccggtgaccgtaaagggttacaggcatggctggagcgtttacctgcggatgcaaaagataaagacgagtggcgctactggcgtgcaaccttgctgattgagcagggaaataaagccgaaggcgaggcgatactgcgtgagttgaccaaagctcgcggtttctacccaatggtggcggcacaaaagctgaatataccttatccaatcatggttgaagtggcgaccaaacccgatacctcattggcggacagcccggaaattgctcgggttcgcgaactgatgtactggaatatggataatctggcacgtaacgaatggagctatctggtcgccagccgtagtaaaccgcagcaggaagctctggcgcgctatgcctttaaccaaaagtgggccgatctgagcgtacaggcgacgatagtggcgaaactttgggatcatctggaagagcgcttccctctggcctggccgcaagaattccgtcgggcaacggaaggcaaaggcattactccaagttatgcgatggctattgcccgacaggaaagtgcatggaacccgaaagcgcagtctcctgtgggagccgcaggtttaatgcaggtgatgccacgtaccgcagatcatacggtaaaactgaataatatcagcggctatgtgaacagcagccaattgctcgatccggtcacaaatatcgaaattggcaccagctatctggaagaggtctatcagcagtttggccgcaaccggattctcgccagcgcggcgtataacgccgggccatcgcgagtgaatacctggcttggaaatagcgcggggcagatcgatgccgttgctttcattgaaagtattcctttctctgaaacgcgcggctatgtcaaaaacgtcttggcttacgacgctttctatcgtcactttatgcaccgtccggcaaaggtgctgagtgatgcggagtggcagaggcgttattgatttttgccagtttatgctatgctgctgtactagttaaatagtatggcagcataccatgaccgaaaatgtcgtaatcgatcccgctctttccgctgaagataaccagaactggttaagctttattgcgctgctgcaacaggccgttgcgcaagatcttcaccaaccgttgttgcaactgatgctgacgcccgatgagcgtgcggctttggggacgcgcgtgcgtattattcaggagttaatgcgtggtgaattgagtcagcgggaactgaagaaccaactcggcgccggtattgctaccattacccgaggttctaatagcctgaaagcctcgccaccgcagctgaaaagctggttggaagcgcaattactcaataacgaatcgtcgtcgcaatcctgaaacgattgaaacgtcaggtaaagattgagcctttgcctgacgctctattgcctaatcagctttccagatagaccgagttatggaaaggaactaaagcaagtactaacgcttgatggtaaacgctggtgcgtgacagtttaccatcggtaaagactccaatcgcaccaccctgacgtttcacttccgcattacctgtcaaaagtgccatttcgtcgcctagttcacgaccttgattaattccttgtaatataatttgcggtagcatcaaactggctgagcgggattctccccgctgctgcaagtgttcaacgactatccaggcaaaggtcatattatcttcgataccggcttcgaccccgacccaaaaatctgcttccggctttatctgacgtgctgcggcgacccgctggcgtgctccggtgcgggtttcgtcactgccaattggctggagggatacgccgctatcgacgttgataccttcgatatggcaggcgtctgcgccaaaaacatcgttgaaggcgagagtgatagccctgatctttgcagggttggtagttgcggcaacaacatggtacataatgagcttaagtatcctttagctaattttacgcagtataacggaaatcagacatgttacaggtatatctcgttcgtcatggcgaaaccgaatggaacgcggcccgccgtattcaagggcaatcagacagcccgctgaccgcaatcggtgaacatcaggctcgtctggtcgcacgtcgggtgagcagtgaaggtatcacccacgtcatcaccagcgatttgggacgtacgcgacgcacggcagaaatcattgccgatgcctgtggctgtgacgttattgttgagccgcgtctgcgtgaattgaatatgggcgtgttggaggagcgtggcatcgacggcttaaacgcgcaggaagaacggtggcgcaagcagatggtcgatggtactcctgatgggcgtattcctcagggtgaatccatggctgaactggcggcccgtatgcgtggggctttggaaagctgccttgagctacctccgggcagcaaaccgttgttggttagccacggtatcgcgttaggttgcctgctcagcactattttggggttgccgccccatgctgagcgacgcttgcgtttgcgcaattgttcgctatcccgcgtggattatcagcaaagtccgtggttggcatcaggttggatagttgagaccgcgggcgatatcacgcatctggatatgcccgcgttggacgaattacagcgttaacgtcggataggaatcagatattcgcagtgtaacaccttcggaggctggtcttgtggccggccctgagggaagaaacgttcgatatcatagcctttgcggcgagtcatctccgacagcggcaggcaggtaccatacagtgtcagaataaagtcctgtagcccttccgccggcccttcatagataaacttaacgtattcaccgccctgcaaaataaccggctggccttcagttacgttggctggagtatgttgaggctcaatggccgtggtgtagaatatctcctgctcatcatctttttcctgatttggccgggaatgatgcaagccgtacagtaccggcggcagcttatccgcaccgccaagatattgatgccagaaatgagagcgcaactcggttcggaacgtggaaatttgttccagcgtgcatgaatagctttgggttaaaccaaccaaatgctgttctggcaaggtaataaactcggcctgaggcagggtataagaccccaaccgaataggcgggcagatgcctaaggaatgccagtcttccgctcgacgatagagcgcaggcgtttgcgcaaactgttttttgaatgcgcgagtaaaggtttgctgggagtcgaaacggtattgcagtgcaatatccagaatgggccgactggttagacgcagcgcaaccgcagctttagatagtcttcttgctcggatataggcaccaatagcgttaccggtgacgtctttaaacatccgttgcaaatgccatttagagtagcctgccttggcggcgacattgtccagtgataaaggctggtctaaatgactttctagccagctaagcagatcacgaatgatactggcttgatccatagatcttcctcataaagcggcctggattaaagtaatagcttgagagctgaaaattagctccgccgcatagtagcaattttttttgtctcagactgcttaagatttttattagcaactgtgctaaataatgttgttaagctggcgaaagcttatttccaatgaatatcttattatcagtacaaaaatttaactttgcgtaatctatcgggtgtaatggagtaagtgtatgaaaaaaaattggatattgctttgcggactactttcttttggcgccatgagcgtgcatgcggaagaggttggctcggtggatacggtatttaagctgtttggccctgaccataaaatcgtcattgaagccttcgatgatcctgatgttaaaaatgtaacttgttatatcagccgtgcaaaaaccggtggaatcaagggcggattagggctggcagaggatactgccgatgcggctatctcctgtcagcaggtcggaccgattgagttatcagagaaaatcaagaaaggaaaatctaaaggggaggtggtcttccagaaacgcacttcgcttattttcaaaaagcttcaggtcgttcgtttctacgatgcaaatcgtaacgctctggtgtatctgacttattctgacaaagtcgttgatggttcaccgaagaatgctatcagcgccgtgccgattattccttggacgcacgccaacccataacgaagaattataagcaaaaaaaagccagcacttcagcgctggcttttttataaagttgataaccggttgattactcttccagatcgccacagaaacgataaccttcgccatggatagtagcgatgatttctggcgtatccggagtggattcgaaatgtttacgaatccggcggatggtaacgtcaaccgtacggtcatgaggtttcagctcgcggccggtcattttcttcagcaattcgccacgggattgaattttccctgggttttcgcagaagtgcagcatggcgcggaattcactgcgtggcagtttatagtgttcgccagcagggctgatcagtgagcggctattgatgtccagctcccaaccgttaaatttatagctttcaaccagacgacgctcttcgcccacgctacccagattcatggtgcgtgacagcaagttacgtgcacgaatagttaattcgcgcggattgaaaggcttggtgatgtagtcatcagcaccgatttccagaccgagaatcttatccacttcattatcgcggccagtcaggaacatcagcgcaacgcttgcctgttcacgaagttcccgagccaacaataaaccattcttgcctggcagattgatgtccatgataaccaggttgatatcattctcagacagaatgtgatgcatttcagcgccatcattggcttcatgaactacgtagccttccgcctcgaaaatgctcttcagggtgttacgagtgactatctcgtcttctacgatcagaatgtgcggggtctgcatgtttgctacctaaaattgccaacaaaatagaaataggaagtacagaagtctttgttacataggaatttttattgacttgtaactcgtcatcctatttatcacatgactaaagtacgtaaacgcgttcttgatgcactttccatcaacgtcaacaacatcgctagcttggtcggggtgttactccctacagccccaaaggtgacaaaagcggcgcatatcctaaccctattaacagcaacataacagtgtgagccgaatctaccacccaacaaaactacgctttgttgacatatatcaaattcaattgtagcacgttaacacttttgtgaaaaacacttacaagaataccagcttaagtgatagttggttaaaataactgatcgtttcagtgtatttaatattaaaaaaatcggtttatgtataggtgaataatttaatttgtaatgcattgatttttattgtttaaaatcaacatattctgagtatcagccgtcagtcatgattttcaacgttgggcctctctttcactcaatagataagataaattaccgtaaatgttatataaatgtaaacggcccgtccgttatatttacatcagcagcgttgcggtgaaaaacagcttattcacgtcccatgctccccagggaggtcacccgtagccaaacgtccttattgcctcgctttttccccctttggctctataggaacgaaagaaggaacgaaacacgctttctcattatttgacgaaatgtcaccgtcggctcgcacagaaaacagaaaaaatgctgctgtacatactagggataaaattcgcctgcctggctatatattccttaatttgtgattttatcggtttttactgcttttaatttcttttttatagaatttaaattctttgataccgatgcttaattccgcgagccagttaacaaaaaagtttgacttgggtcgactattgctttaaccaatagagggacagcttcaattatgaaatgagacagacagaaaacatgcgattcatcagcctgactacaacgattattaccaccaccgaaaccacaggttacggggcgggctgacgcgtacaggaaacacagaaaaaaagcccgcacctaaacagtgcgggcttttttttcggttcataaattcaggagagaatcagaaatgcgagtgctgaaatttggcgggacctcagttgcaaatgcggaaagatttttgcgcgttgccgatattatcgaaaacaatgcgcgtcagggacaggtcgcgaccgtactgtctgcgccagctaaaatcaccaatcatttggttgcgatgattgataagaccgtggcggggcaggacatctctcctaccatgagcgatgccgaagctatctttgccgatctgttacgcggcctgtcagaagcgcaaccgggttttgcctatgatcgtttaaaggctctggtttcccatgaatttgcgcaactgaaacaagtgctgcacggaatttccctgttggggcaatgtccggacagcattaatgcggcgattatctgccgtggcgagaagctatccatcgcgatgatggaagcggtatttcaggccaaaggttacccggtgacggtaatcaacccggttgagaaactgttggcgcagggccactatctggaatctaccgttgatattgccgaatctactcggcgcatcgccgccagtgcgattccaaacgaccatatcatcctgatggccggtttcaccgccggtaacgataaaggggaactggtggttttggggcgtaacggctctgattattccgccgcggttctggccgcctgtttacgcgcagactgttgcgagatatggactgacgtcgacggtgtgtacacttgcgatccgcgcaccgtgcccgacgccagattgctcaagtcgatgtcttaccaagaggcgatggaactgtcctattttggcgccaaagttctccacccccgcaccatcgctccgattgcccagttccagattccctgtctgataaaaaatacctctaacccgcaagctcccggcactttaatcggtggcgataacagcgatgacgcttatccggtgaaaggtattactaacctgaataatatggcgatgattaacgtctcagggccaggaatgaaaggcatggtcggcatggcagcgcgggtctttgccgtgatgtcacgcagcggaatttccgtggtgttaatcactcaatcctcttctgaatacagcatcagtttctgcgtacctcagggcgagctggcgcgtgctcgcagggcgctggaggaggagttttacctcgaattaaaagatggtgtactcgacccgctggacgttatggagcggctggcgattatctccgttgtcggcgatggtatgcgtactttgcgcggtatttcagcgcgcttcttctccgcgctggcgcgagccaatatcaatattatcgctattgcacaaggttcttccgaacgatccatttccgtggtggtgaataatgattctgtgaccaccggcgtgcgggtttgccaccaaatgctgtttaataccgatcaggttattgaagtgtttgtgattggcgcaggcggcgtcggcagtgcgttgatcgagcagatccaccgtcagcagccttggctgaagcaaaagcatattgatttacgcgtctgcgggattgccaattctaaagcgttgctgaccaatgtccacggcattgatttggcgaactggcaggagcaactgggcgcggctcaggagcctttcaacctgagccgtttgattcgtctggttaaggagtatcatttactgaatccggttattgtggactgtacttccagtcaggccgtggccgatcagtatgccgatttcttgtccgatggtttccacatcgtgacgccgaataagaaagccaacacctcatcgatgaattattaccgccagctccgtgctgctgcggctaaatccagccgtaaattcctgtacgacaccaatgtgggcgcaggcctgccggttatcgagaatctgcaaaacctattgaacgccggtgatgagctggtgcatttctccggcatcctttccggttcgctgtcctttatcttcggtaaactggatgaaggcatgtcgttatcagaagctacgctgcaagccaaagctttaggttataccgagcccgatccgcgcgatgatctctccgggatggatgttgctcgtaagctattgattttggctcgagaagcgggttacaaattagaactggctgacattgaagttgaatccgtattgccaccatctttcgatgccagcggcaatgtggaaagcttcctgaaacacctgccatcgctagacgcagagttcgctcgtcgggtcgctgatgcaaccgcgcagggcaaagtgttgcgctatgtcggcgtgattgaagacggccgctgtcaggttcgtatggatgcggtcgatgacaacgatccgttgtataaagtcaaaaatggtgagaatgcgctagccttctacactcgttactaccagccaattcctttggtcttacgtggttacggtgcgggtaacgatgttaccgcagctggcgtatttgccgatttgttacgcacattatcctggaagctgggagtttaattatggttaaggtctatgctccggcatcgattggcaatgttagcgtcggttttgacgtgctgggtgcggcggtttcacccgtggatggctccttgctcggcgattgcgttagcgtaacggcagcagacagtttcagtttgcagaatgaagggcgcttcttcagtaagctgcctgtcgatccaaaagagaatatcgtttatcagtgctggcagcgtttttgtcaggaaataggcaaggagatcccggtctcaatgcggttggaaaaaaatatgccgataggttccggcttgggctccagcgcctgttcggtcgtcgccggtttaatggcgatgaacgaattttgcggccagccactggataaggtcactctgcttggtctgatgggcgagctggaagggcgggtgtccggcagcgtgcatttcgataacgtagcgccttgctatctgggggggctacagctgattttggagcaagcggattgcattagtcagtcggtgcccggctttgacgattggctgtgggtgatggcttatccgggaattaaagtttctaccgctgaagcgcgggcgattttgcctgcacaatatcgtcggcaggattgcatcagccacgggcgtaatctggccggttttatccacgccagccacacgcagcagcctctgttagccgctaaactgatgaaagatgtcattgcggaaccttatcgtacgcaactgctgccgggctttgccgcagcgcgtcaggccgcacaggatattggtgcactggcctgcggaatttccggttccggcccaaccctgtttgcggtgtgcaacgaaagcgccaccgcgcaacgcatggcggattggctgcaaaaaaactacctgcaaaacgacgaaggttttgttcatatttgccgtctggataccgcaggcgcacgactattgggataacgcatgaaactctacaaccttaaagatcataatgagcaggtcagctttgcgcaggccatcaagcaaggcttgggtaagaatcaggggctgttttttccgctggaattgccagagtttgaactgaccgaaattgataacttgctagatcaggattttgtgactcgcagcagccgcattttatccgcttttatcggcgacgaaatagctcctgaaaccctgaccaaacgcgttaaagccgcttttgaattcccggcgccagtggctccggtcgaaaacgatgtctcgattctggagcttttccacggcccaactttggcattcaaagacttcggcgcgcgctttatggcgcagatgctggcagaagtagccggtgagcagcccgttaccattttgaccgccacgtctggcgacaccggtgcagcggtagctcatgcattctacggtttgaaaaacgtgcgagtggtgattctgtacccgcgcggtaaaattagcccgttgcaggaaaaactgttctgcaccttgggtggcaacattcataccgttgctatcgagggtgatttcgatgcctgtcaggcgctggtaaaacagtcctttgatgacgaagagttaaaacaagaactgcaccttaactctgctaactcaattaatatcagccgcttgctggctcaaatctgttactacttcgaggccgtggcgcagctgccgcaggaagcgcgtaaccaattggtgatttcggtaccgagcggtaacttcggcgatttgaccgcaggtctgctggcgaagtctttggggttgccggtgaaacgctttatcgccgcgactaacgctaatgacactgtaccgcgcttcctggttaacggtcagtggcagcctaaggctaccgtagcaactttatccaacgcgatggacgtcagccagccgaataactggccgcgagtagaagagctgttccgccgtaagatttggcagttgaaagaactgggtcatgcagccattagcgatgaagtgaccaaagaaaccatgcgggaactggctgaaatgggctatatctctgaacctcacgccgccattgcttaccgcgcgttgcgcgatcagctgcaagacggcgagttcggcctgttcctcgggacagcgcatccggcgaagtttaaagagagcgtagaagcgattctggcgcaggaattaccgttgccgaaagagttggctgtcagagcatcaatgccattgttatctcgtgatttaccggcagattacgatcaactgcgcgcgttcctgatggcattaccgaaataagctagcgcgttttgcaaaatacagcgaactaactaaagcaggaaagggccgattggcccttttctatatgacttttatatataaatagtacatcaatcagcttagtgctgctcgggtcgtttaaagaccagctcgtttttcgccgagagtcccgaatcgaactgatagccttccagattgaaatccaccaattgctcggttttactcaaccggttctgaatgataaagcggctcatcaacccgcgggcttttttggcgtagaaactgataattttgtatttaccgtttttctcatccaggaataccggtttgatcagcgtaccgttcagtttagccggctttattgctttaaagtattcatccgaagccaggttaatcagtacgttatcgccttgctgttccatcgcctgattcagtttctcggtcagggtattcccccaaaaggcgtataagtccttaccctgtgagttagccagtttggtgcccatttccagacggtatggctgcataagatccaacggacgcaacaggccgtataacccggaaagcatacgcaagtgcttctgagcaaaggcaaaatcttcttcgctgaaatcctgcgcctgcataccggtgtaaacatcgcctttaaacgctagaatcgcctgacgggcatttgccggcgtgaatttcggctgccactcgctaaaacgggcggcatttaatccagccaatttatcgctgattttcatcaggctggcaatctggggcggagtcagttcacggcaaatctcaatcagagcctgagactgatccaacaactcgggctgagtgtaggtttgggtagccaatgggctttgaaaatcgagagttttagccggagagataataataagcatgacgacatcctgtttatccagattggcacactgtagcaaaaagcgagcggtaaccaaacgaagaatggtcaattgctaagataggaagcatcgcgtggctaaatcgtctcagcatcatgataatgaaccaagttgttattaatccacggggttcaacgccttttcgcaggcgaaaacggttgctcggagaagtcggcgcgaccggtgtttttttaaacagttgaactgccttgcaccggggcttctgcgtgttattatcaagaaaaggctgggttgcagaatgccaaaagttcatgcacaaacgatgagaaacgacaacatgaccgataaacttacttccctacgtcaattgactaccgttgtagctgacaccggggacattgcggcgatgaaactgtatcagccgcaagatgccacgactaacccctctctgatcctgaacgcggctcaaattcctgaataccgtaaattgattgacgacgctatcgcctgggctcgcgagcaaagcagtgataaagcgcagcaagtcatcgatgcgggtgacaagctggccgttaacatcggtctggaaattctgaagctgatcccaggccgtatttctaccgaagttgatgcgcgtctgtcttacgacaccgttgccagcgtagcaaaagccaaacgcctgattaaaatgtacggtgatgcgggcatcagcaaagaccgtatcctgatcaagctggcttctacctggcagggcatccgcgccgccgagcagttagagaaagaaggcatcaactgtaacctgactctgctgttctccttcgctcaggcgcgtgcttgtgctgaagcgggcgtatatctgatttctccgtttgttggtcgtattctggactggtacaaagcgaacggcgacaagaaagagttcgcaccaaacgaagatccgggcgtgatttccgttaaagaaatctaccagtattacaaaaaacacggctacaaaaccgtggtgatgggcgcaagcttccgtaatattggtgaaatcatcgaactggctggctgtgaccgtctgaccatcgctccaactctgctgaaagagttggcggaaagcgaaggcccactggagcgtaaactgtcttacaccggcaacattgccgctgcgccagcgccgctgactgaggctgagttctactgggaacacaaccaagacccaatggccgttgagaaactgactgacggtatccgcaagtttgctgtcgatcagggcaaacttgagaagatgattgccgatctgctgtaattttataccggcaggcaacattgaacgaaaaaggtggcgtaagccgccttttttacgtctgaagctcgcctatttctgctctgtgacggaacaaaactatacttgattctgtgagttgagagggttgaggtaatagcgtcgcgtagtatcatcccgcccacagagaaagattttttcattgaggtcgttgtatgcatacattgcgtgtaggtttagtgtccatttccgatcgggcatccaatgggatttatcaggataaaggcctgccagcgttggaagactggttaaaaagtgccttaacgagtgaatttaccctcgaaacccgtttaatccccgatgagcaaacgctgatagagcaaaccctgtgtgagctggtggatgaaatgggctgccatttggtgttgaccaccggcggaacgggcccggcgcgtcgcgatgtgacgccggatgcgactctggccatcgccgatcgtcaaatgcccggtttcggcgagcaaatgcgccaaatcagtctacactttgttcccacagcgattttatcccgccaggttggcgtgattcgcaaacaggcgctgatactgaatttgcccggccagcctaaggcgataaaagaaacgctggaaggagtaaaagacgcggaaggcaacgtgttggttcatgggatttttgccagtgtcccatattgcattcaattgttggatggcccgtacattgaaaccaacagtcaggtggtagcagcattccgtcctaaaagtgccttacgtgatacaaaaatctaaattcatatagtttctgacataagataccattctaagcatgtgaggatttttgtacggtatagtaatttttactttacaaagagttgtaatatttttaactcaatactctggcttatcacggtgtcttatggatcaacagcacaatcgccgattgaatcggcaagattataaaactctgacgttagccgctttgggcggagctttagagttttatgacttcattatctacgtattttttgccgcgattatcggtgaactcttcttccctcccgatatgcctgagtggctacgtcaggtgcagacctttggtattttcgccgccggttatctggcgcgaccattgggcggcattatcatggcgcacttcggcgatttggttggtcgtaagaagatgtttagcctgagtattctgttaatggctttgccgacgctggccattggtctgctaccaacttatgccactatcggtattgccgcacctttgttactgctgctgatgcgcgtattgcaaggcgcggctatcggtggagaagttccgggcgcctgggtatttgtggccgagcatgtaccgcgtaaacgcgttggttttgcctgcggcaccttaaccgccgggttgacggcgggcattctgctaggctctctggtggctgcggggatgaaaaccaccataagcaccgaggcaatgatgaacggcggctggcgtattccattcttcctcggcggtattttcggcctgttcgctatgtatcttcgccgctggttacaggaaacgccgatctttaaagagatgcaggcgcagaaagcgctggcagagggtttgcccttgaaatcggtcgtggttaaccataaaaaagaaatcgtggtttcgatgctgctgacctgggtgctgtccgctggaatcgtggtggttatcctgttgacgccaacctatctggaaaaacagtacggcgtgatgtcggcgctggcgatgcaggcgaatagcgtggcgattgtggcgctggtctgcggctgcatactctctgggctggccattgatcgctttggcgcgagtaaaacctttatcgtcggcagcgtgttactggcggtagcgacttggtcgttttatcaggctgatttaaccgatcctgtcaagctgttcactcattatacctttgctggatttagcgtggggattgtcggtgcggtaccttatgtgatggtccgggcttttccggcagaaatccggtttactggaatttcattttcctacaatgtggcatacgccatttttggcgggttgacacctattttggtcacgttattgatgaaagttacgcctatggcacctgcctattatatgttgctgttatcagtggtcgggttcctgttggggatatatttacgtaatgatattaatagtgatctgaatgtacagttgtcaaagagggttctggctgagtagataaccgccaattagatgattattctaaataaatagcccatacatcatgggctatttttaactcgtataatttaaaattcgtgcttgaaattaaaaccaactttttgcttaacacgagctgagggttgcgaaataacttcagaaaataatgttctagcgccttgttgttgtaaatatcttgccagcgctctaaccgctgcggtccccgctcctctgactgtaccgtcgcgatcgggaaataggacataatctggtagtgttgctgatgcaaccagttcaacttcatctttgctgttaaaacggtcggcaagaacaaccgcgataatttttccctgtagtttgactaccacatagatttcaccggggcgttgaagccttaatctacgatggataatacctgtaacgatatgcccagcatggaggagtctactgagggcgctgttattttcatttgcgccggaatccgcgccgaaatccgcgttggaatctgcactggaatccgcactggaacctttgatatcttgttcgatatgcgttccttggtactgcatcccccattgcgcgatagtttcactcagctttttacgcatggctcgagcattcttaacttcactatctgaaagcttttcttcttcttccggtgttagcgttgggattatctctatttcgaattcagtatcattttgcacaacgggctcaccctgcgaaattattattggaggcgtatctctatagacaaatgtctctagtaatagctcgtaaatacctaagggtaatagctctatctgagagggcgactcatcagaagaagaagagaaactataatttaagtaattgagttgagcatagtcaaatgctgttttaatatgatcaagcgtattttctgtgtttttctcagctattttttcttttatagactgaactaatcgattccctgtctctttattttctactgtaacacctatatttcctgtccggatgatggaatctaggattctgccaaaaaatgcggcattccaagtttcgggactatgaccgaataataaggtgaagtcagtcataatatccagcgtccattcaatacagtgaggtcttatttgacgtgtttgacgagaattaagtagagagtaaagagacactctacaggcttttgctacagcaggaagactcagtgcctgaccatgttgattggtgtcgatataagttaatgtcatataatgatcaaaaatttcttgtatttgtaacgctggtgttcttgacggctttttcttcagtggactactgcttccagcaatatgtaaagttttaccttgtgtattactgctaaaatatttatctgcacggaatacaataccatccaattgttgacatgtatcttgcattagatagttatagatatttaaaaaaggagtaaaggcgcatagtattttactggtttgtgccacatctcttttttccaaatacttatcgcctgtatctgcggtgagtatagattttgcgagaactaaaggattatctttattgtggttggttatgattatttctgtatctgtatctgtatctgtatctgtatctgtatctgtatctgtatctgtatctgtatctgtatctgtatctgtatctgtatctgtaaatgatgaagcatcattatcccaaccaaaagaaataatgggagaaatatctactagattactctccaacatttgcatgtattgaagttgtattgtgtctttttttatttgtataataaaagctaagttatcgatattgttgtagtgatcaaaataaaacttatttttcatttttcgatcagaaaacataacgcccctgttacttatgctaatattcgggccaccagaaattttgatgctatacttatcgcctccattcgtacctttactatcaaactctagtagaacctgtttgttttgtaagcgttcatcagtccagtattgaccaaatgctttagtgatgtttattttatagttatttataacaacacatcgttgatcacaattaataccttctttttctgatgctttaatgctagtgatgacattgctcatttccagcgcttgtaaatcgctgtcattgacgctctctgttaacccgaaaaaaggaggattgtaattatcattcttatatacagttgcgagcataccaggcggaatgctgatggattttattctatcattaggaataggtaattctttttgtccagattcaataatgatttctggatcgctatataaatctattttctgatgtgatgctaaacaagtactttcaccttgaaaatcatcctctgtataaaaacagattgcaggttctacctgatatgagcctattttattatataattctaatgctattaactcaggtagattaatatcatgtttcactcttgtttttgtaccagagaaattaatgccactataaagggtgagcaccatacctggtgggatagaaattgatgctatctcattatcaaagccatcattataaatagagcctgattccctttctgcggagcaaaatgattccccttcaaatttgtcgagttcataaaaacagacttttgtttcgtctgaataggatggttgcgatattattaatatgatgcttgctaatagtcttgtaactatacgcataggctctccctttgatgttattgatttttatgtttcatatcatcgacagggtttcaatactatatgatgcgtattttctttgctttatctatttttatttctctattttattatttagcagtgctaatttgagatttatgtaatttagatttaaatataaaaaagtaaaaataaaaaaactccgaatataaacattcagagtttttgggatatgaattttcaagcaaactgtaattaaactatcggttgcttaggcaaagtctagcgtggttcgccaatcggtaacactgtgcgaccatattgttcgttcaatacttcagccattgccagataaatcgcgctggcaccgcagatgatgccttcaaaaccagcgaacaccagcagcgagtgattaccggtaaagttaccgatagccaacagggcaaacagcagtgtcaggctggcaaacacgaattgaagcgcgcggttggctggcaaggtgccgaagaacataaacagggtaaagatgccccagatcccgaggtaaacgccaaggaactgtgcgtcagtggcttctgccatacccattttaggaagcatcagcaagccgaccagactcagccagaatgcgccgtaagaagtaaatgcagtcgcggcaaaggtattcccttttttatattccagcagaccagccagaatttgtgccaaaccgccgtaaaaaatccccatgctcaggataacggaagtcagggggaagaagcccgcgttgtgcaggttgagcaagacggtggtcatcccaaagcccatcaggcctagcgggccaggattcgccaacttgttggtgttcataagtcctctgcaataacagattgctaaaaaaatggataaatatccgaataagtataaatcgcctgaatgagtaaaaagtcgtctattccctcagtgcgcgcggcatcataatgatctgttcgaccggaaacaatgatcttgagtgcgataaaaagtaattttttttcatctccccccttgatgatggttttcatggccccatcttattcccaaccgcagtgactaatcgtggttagcggaaaattgtcagtaaatatttggcagttgaaaattagaaatccgcccatatatagattagtaacttgaccgattatgacttttttcgtggaggcgttttagatgggtaaaattattggtatcgacttgggtactaccaactcttgtgtagcaattatggatggtacaaaagcacgcgtgctggaaaacagcgaaggcgaccgcacaacgccttctatcatcgcgtatacccaagatggtgaaactctggttggtcaacctgctaagcgtcaggctgttactaacccacagaacaccctgtttgcaatcaagcgtttgattggtcgtcgtttccaggacgaagaagcacagcgtgataaagacatcatgccgtacaaaatcgttgctgctgataacggcgatgcatggctggaagtgaaaggccagaaaattgcaccaccgcagatctctgctgaagtgctgaaaaaaatgaagaaaacggctgaagattatctgggcgagccagtaactgaagcggttattactgtacctgcatacttcaacgatgctcagcgccaggcaactaaagatgctggccgtatcgcgggtctggaagtgaaacgtatcatcaacgaaccaaccgcagcggcactggcctacggtctggataaagaagttggcaaccgtactatcgcggtttacgacttgggtggtggtactttcgatatctccatcatcgaaattgatgaagttgacggcgaaaaaaccttcgaagttctggcaaccaacggtgatacccacctgggtggtgaagactttgatagccgcctgatcaactacctggttgaagaattcaagaaagaccaaggtatggatctgcgtaccgatccgttggcgatgcaacgtctgaaagaagcagcagaaaaagcgaaaattgaactgtcttctgcacaacagactgatgttaacttgccatacatcaccgctgatggcagtggtccaaaacacatgaacatcaaagtgactcgtgcaaaactggagtcactggtagaagacttggttaaccgttctatggaaccgctgaaagtggctctgaaagacgcaggtctgtctgtatctgacattcaggacgttatcctggtcggtggtcagactcgtatgccaatggttcagaagaaagttgctgacttcttcggtaaagaaccacgtaaagacgtgaacccggatgaagccgttgctatcggtgcagcagttcagggcggcgttctgtctggtgaagtaaaagatgtgttgctgttggacgttactccattgtctctgggtatcgaaacaatgggtggtgtgatgactccgcttatcactaaaaacaccaccatccctactaagcacagccaggtgttctctactgcagaagacaatcagtctgcggtaaccatccatgtgctgcagggtgagcgtaaacgtgcgcaggacaacaagtctctggggcagtttaacctggatggcattcaggccgcgcctcgcggtatggcacaaatcgaagttaccttcgatatcgatgccgacggtatcttgcatgtgtctgcgaaagacaaaaataccggtcgcgagcagaagatcaccattaaggcatcttcaggtctgaacgaggaagaaatccaaaaaatggtacgcgatgcggaagctaacgctgaagcagaccgtaagtttgaagagctggttcagactcgcaaccaggctgaccacctgattcatggcactcgtaaacagttggaagaagctggcgacaaactgccagcagaagacaaaactgccattgaagatgcactgaaagcgctggaagcagcggttaaaggcgaagacaaagcggaaatcgaagcgaaaactcaggcactggtccaggtttctggcaagttgctggaaatggcacagcagcaggcggcagccggcgaagcgggcgatgccagcgcgaagaaagaagacgacgttgttgacgccgaattcgaagaagtaaaagacaaaaaataatagcccttaagcgggcacagcagtggtaagagatactgttgctggaaaccagcacgggcgtcgaggaaactctacgcccgtgcacgcatgttaagggtaggaaaaacagaatggcgaagagagactattacgagattttaggcgtccccaagacggcggatgagcgtgaaatcaaaaaggcctataagcgcctggcgatgaaattccatccggatcgtaatcaggaacaggacgccgaaggtaaattcaaagaagttaaagaagcctacgaaatcctgaccgatgcgcaaaagcgcgctgcttacgatcaatatggccatgcggcttttgaacagggcggtatgggcggcggcggcggatttggcggcggcgctgattttagcgatatctttggcgatgtatttggtgacatttttggcggcggtcgtcgtcagcagcgcgccagtcgtggttccgacctgcgttacaatatggatttgacgttagaagaagcggttcgtggtgtaaccaaagaaatccgcattccaacgttagacgagtgtgatgtttgccacggcagcggagcaaaaccaggcagttctccgatcacttgtccgacttgccatggtgcaggtcaggtacagatgcgtcaaggcttcttcaccgtgcaacaggcgtgtcctcattgccacggccggggccaaattatcaaagatccgtgcaacaaatgtcatggtcatggccgcgttgaaaaatccaaaaccctttcggttaagatcccggcgggtgtggataccggcgaccgtatccgtttagcgggcgaaggtgaagctggtgaacacggcgcaccatcaggcgatttgtacgttcaggttcaggtgaaagctcacccgatcttcgagcgtgaaggcaataatctgtattgcgaagtgccaattaactttgcaatggcagcgctgggcggtgaaattgaagtaccgacgctggatggccgggttaaactgaaggttcctgcggaaacgcaaaccggtaaattattccgtatgcgcggtaaaggcgttaaatcagttcgcgggggcagccagggtgacttgctgtgccgtgtagtcgttgaaacgccggtaagtttgagcgagaaacagaaacagttactgcgtgaactagaagaaagtttcggtggtgcagcgggcgagaaaaacagcccacgctctaaaagcttcctcgacggtgtgaaaaaattctttgatgatttgacccgttaatcatagaacctatgattaggtagtggaaactaaatccctggtatataccggggatttttttcgccaatacttgcagctgcaacgtgatgttaatcattaattgctcggtttatacgagtggttaatgcaataaaaacgactattttcgagttaataattagcctagaatttgtaaattatttgccaatctctttggttggtttctctgtccgatgtagggagtattcattgtgacaaatattattcgccaattcttacgactagaagcggccgggggcatgattttgatcgtggccgcggtggttgctttactgatggctaacagcccactacagggtatttatcaaacgttcttagacattccggtcgcggtaaaaattgcgtcattggatatcagtaaaccgctattgctgtggattaatgatggtttaatggccatcttctttttggtcgttgggctggaagttaagcgcgaactgatggaaggttctttggctggccgtgataaagcggtatttccggctatcgcggcattaggcgggatgttggctccggcgttgatttatctgttatttaacggtgcagatgaagttacccgtcaggggtgggctattccagcggcaacggatattgcctttgcgctcggtgtgatggcgctattgggtaaccgcgttccaaccagtttgaaagtgtttttactggcgctggcgattattgacgatctgggcgtcattattatcatcgcatttttttatactcaggatgtttctctggccgcattgggcgcggcagccgcagcgattgcgctcttggcttatatgaactggcgcggagtcgggaaaacctcggtttatctacttgtcggcctgattctgtgggtgagtattctgaaatccggagttcatgcgacgctggccggtgtgattgtcggctttatgattccgttgcataccaaagataagtcttcaccttccgaatctttagagcacgggctgcatccgtgggtggcttatctgattttaccgctgtttgctttcgctaacgcgggcgtatctcttgaaggcgtttcgcttgcgggactgacgtcgttgctacctttggggattgccagcgggctgtttattggtaagccgttggggattttcctcttcagttgggtcgcggtgaaggttggcatcgccaaactgccggaatccattaattttaaacagatttttgcagtgtcagtgctgtgcggtatcggttttactatgtctatcttcattgcttcactggcgttcgaaggtggaagcgaagctttgagcacttactctcgcttaggtatattgctgggttctacagccgcagcgattgtgggatacacactgctacgcttggttttaccgaacaaaacgccggccgttaccgcaaaataattgtcgtaaatcattagaaggaataggccgaactgccgatgtagtgctcttttacaacgtcggcagttttgcttgatgggttcccgagatcgcattatgttttgatctcagaacaaaggaagttgatcgctcgggaaattgatcaccctatcgggcgatacgttaaggagatcactgcatgcgaatgtcacatatcaattttaaccacctctactatttttggcaggtgtgtaaggaaggctcggtagttggagcggcggaagcattgtttctcacgccacagaccattactggtcagattaaagccttggaagaacgcttgggcgggaaactatttaaacgccaagggcgcgggctggtaccttcagagttaggccagttggtttttcgttacgccgataaaatgttcatgcttagccatgaaatgctggatatcgttaattaccgtaaagaatctaacctgctgtttgacgtcggcgtggccgatgcgttatccaaacgattggttagccgagtattagaaaccgccgtggtggataacgagcagatacatttacgctgcttcgaatctacccacgaaatgttgttagagcagttaagtcagcacaagctggatatgatcttgtctgactgtccggtagattccagccaacaagaagggctgttttccgttaagctgggcgagtgcagcgtgagtttttattgccgtcagccaataccggaagcgccttttcctgcgtgtttgcaggagcgtcgtttgttaatcccaggtcgccgttctatgcttgggcgcaagttactgaactggataaacagcaaaggaattcaggttgagattctgggcgagtttgatgatgccgcattgatgaaggcgtttggggtctatcacaatgcaatttttgtcgcgccatctatgtatgccgatgatatcttttcaaatgaacaggttgtggaaatcgggcgtttagataatgtgcatgaagaatattacgttatctttgcagaacgaatgattcagcatcctgcggtacagcgtgtgtgtaataaagatttcacgtcattatttaacagttgaaagctcagtggttaaagtttaatcgctgggcatttaatagccgaaagtttgactgttgatgatttaaccgctgaaagtcggtttgatagataagaacgtagtcagcaaagaggatgctctatcagattatcgggtaggataaactggtagggcgacctaagatttgaatctgtgaccaaattgcagatataaaaaaaccggcctaggccggtctttttacaagcagtcaacttaatgcattactgcattgcgttgatttgcgctgtcaggtttgacttatgacgcgctgctttgtttttgtggatcagacctttacaggactgacgatccacaattggttgcatttcattaaatgctttttgcgccgcgtctttatcgccagctgcaattgccgcatataccttcttaatgaaggtacgcaccattgagcgacggctagcgttatgcttgcggcgtttctcagactgtacggcgcgtttcttagctgatttgatattagccaaggtccaactcccaaatatattctattgaggacaattcaaaggccgaggaatatgccctttttgccttcgtttgtcaatggatttgtgcaaataagcgccgtttgtacgggcggcacttgctacgttgtgatggagcgggattttaccagcttcgagcggtggaatacagtctttcgaaagaaaattccaccggcctcacctattaagccttcggcgatggtttttgcaaaagtcttaacggggggtctgtatccaactgctcgcgcattctacaggataaactggcgtaaaagtgttttaactgcgtattatcggtaaattgctatgactattggagtaaaggtgccaatcgcgggttaaccttaaccgctgtacaaggtataatccggcgatttccactgttttgagccagctatggagctaattcgcggtatacataatatccgggcacgccaccatggttgcgtgctaactatcggtaatttcgacggtgtccatcgtgggcatctggcattactggagcaactcaagcgcgaaggtcagcgcttagggctaccggtaatggtgatgatatttgagccgcagcctttggaactattcgcagcggaaaaagcaccggcccggttaacgcgtttacgtgataaagccaaatatttggcacaggccggcgttgactacttattgtgcgttaaatttgaaccgcgttttgctgccaatatggcccagacctttgtggctcagttactggtagaaaagctcggcgttaagtttctggcggttggggatgattttcgctttggcgctgggcgtcagggggatttccgactgttgcagcaggctggtgccgagtacggtttcgatgttatcagcaccgacagtttctgtgacggtggcttacgcattagcagcacggcgattcgtcaggcgctgcatgatgacgatttgtcactggcagaaacgttgcttgggcacccttacagcatttctggacgggttgttcatggtgatgagctggggcgaaccattggttttcctacggcgaatttaccgttaaaacgtttagtcgctccggtcaaaggagtgtacgcggttgaagtgtatggcttggatccagagccgttacccggcgttgccaatatcggcacgcggccgaccgttgccggcattcgccagcagctggaggttcatctgcttgatgtaactatggatctttatgggcgccacattgatgtggtgctgcgcgcaaaattgcgtgatgaacagcggtttgcttccctcgatgctttgaagcagcaaatcgccaatgatgtggtgacggcccgaaatttcttcgggctaaagacaccggtttaatatttctagccgaaaacggaaccgagaatctaatgagtgactacaagaataccctgaacttgccggaaacagggttcccgatgcgcggcgatctggcaaaacgcgaacctgagatgctgaaacgttggtatgagcaggatttgtacgggaaaattcgtgcggccaagaaaggtaaaaagtcctttattttgcacgatggccctccgtacgcgaacggcaatattcatattggtcactcggttaataaaattctcaaagacattattattaaatcgaaaggtatggccggctttgactcgccttatattccaggctgggactgccacggtctgcctatcgaattgaaagttgagcaactgattggtaaaccgggtgaaaaagtcaccgcggccgagttccgtgcggcctgtcgtaagtacgcgacagagcaggtagaaggccagaaaaaggactttatccgtctgggcgtgttgggtgactgggatcatccttacctgacgatggacttcaaaactgaagccaacatcattcgcgcactgggtaaaatcatcgataacggccatctgcacaaaggtgctaagccggtgcactggtgtaccgactgtggttcatctttggccgaagcggaagtggaatattacgataagacttctccgtctatcgacgtgcgctttaacgccgctgatgcagccaccgttgccgcgaaatttggcgtttctgacgttaccggcccgatttctctggtgatctggacaaccacgccgtggactctgccagctaaccgcgcgatttcactgaatccagaatttgtgtatcagctggtgaaagtgggcgacgagaatttgattctggctgccgatctggtggaaagcgtgatgaaacgcgccggaatcatcgagtggactgtgttgggcaactgccagggcgcggatctcgagctgctgcgtttccgtcatccgttcctggatttcgacgtgccggcaattttgggcgatcacgtgactctggatgccggtaccggtgcggttcataccgctcctggccacggcccagacgactttgtaatcggtcagaaatacggtttggaagtggcgaatccggtagggccaaacggctgctacctcaccggcacttacccaatgctggacggcgtatttgttttcaaagctaacgatatgatcgttgagctactgcgtgagaaaggcgctttgctgcacgtagagaaaatgtctcacagctacccgtgctgctggcgtcacaaaacgccgattatcttccgcgcgacgccacaatggttcatcagcatggatcagaaaggtctgcgtaagcagtcgttggaagaaatcaaagacgtgcagtggattccagattggggtcaagcgcgtattgagaccatggttgccaaccgtcctgactggtgtatttcccgtcagcgcacctggggcgtgccgatgtctctgtttgtacacaaagaaactgaagccctacatccgcgcagcactgagctgatggaagaagtggcgaagcgtgtagagcaggatggcattcaggcgtggtgggatctggatcccgcggaaattctgggtgcggacgccgacgattacatgaaagtaccagacacgctggacgtttggtttgactcaggttcaacccattcttcagtggttgacgtgcgtcctgaatttaacggctatgctccggatatgtatctggaaggttctgaccagcatcgcggctggtttatgtcatcactgatgattgcaactgcaatcaaaggcaaagcgccttaccgccaggtgctgactcacggtttcaccgttgatggccagggccgcaaaatgtccaaatccatcggtaataccgtcagcccacaggatgtgatgaacaaattgggtggcgacatcctgcgtctgtgggtggcttcgacggattacaccggcgaaatcgccgtgtcagatgaaattctgaagcgctctgccgattcttatcgtcgtatccgtaacaccgcgcgcttcctactggctaacctgaacggtttcgatccggttcagcacatggttcagccggaagatatggtggtactggatcgctgggcggtaggtcgcgcgcaggcggcgcaggctggcatcatcgaagcttacgaaaattatgatttccatctggttgtccagcgtctgatgcagttctgttcggtcgaaatgggctcgttctatctggatatcattaaagaccgtcagtacacggcgaaaggcgacagcgttgcccgccgtagctgccaaagcgcgttgttccatatcgccgaagcgctggtgcgctggatggcgccgatcatgtcctttactgccgacgagatctggaaccaactgccgggcgagcgtccagagtatgtcttcactgaagaatggtatcaggggctgtttggcctgaccggcactgaaagcatgaacgacagcttctgggacgaactgctgaaagtccgtggcgaagtgaataaggttctggaacaggctcgtagcgataagcgcatcggtggctctctggaagcggatgtgactctgtttgccgaacctgaactggcggcgcgtctgaacagcctgcaagatgagctgcgttttgtattgctgacttccggcgctcacgtagcggattacgctgcagcaggggatgatgcacagcaaagtgaactcatcagcggcctgaaaatcaccttcaagaaagccgatggcgagaaatgcccgcgttgctggcactacacgcaggatatcggtctggtagcggaacacgcagatttatgtggtcgctgtgttactaacgtggccggtgacggcgaagagcgtaagtttgcctaatgagtaagccgatttgttcgaccggattgcgctggctgtggctggcggtattggtggtggcattggatttggggagcaagcagtgggtgatgactcaccttgcgttgggagagtcgatccctctgatccctttctttaatatgacctatgcacaaaatccgggggcggcgtttagcttcctggcggataaagatggctggcagcgctggttctttgcgctgatcgccgtcggtatatcggtgacgctggcggtactgatgtaccgctccagcggcaaacaacgtctgataaactgtgcttatgcgctgattatcggcggtgccttaggcaatttatttgatcgtatggtacatggcgtcgttatcgattttattcatttctacgttaatgactggcattttccgatcttcaatctggccgacacggctatttgtatcggtgcagcgctagtggtatttgaagggtttttaagcccttcagaaaaagccgcaccaaagaaaggtgagtaatatgtcagaccgggtacaggataacagtgccgttttggtgcattttacgctgaaactggaagatggctctacggctgaatccacgcgcacacacggtaagcctgcgctatttcgcttaggcgatggcagcttatccgatcagttggaagaagagctgcttggcctacagattggtgacaagcatgcctttactttgccaccggaagcggcgttcggtctggaaaacccggatctgattcaatactttagtcgacgtgattttgctcaaaccggcttgccggatgcgggcactatcatgctgtttaccacccgagacggcagtgaaatgccgggcgtggtgcgtgaagtggctgaagaatccgtcaccgttgatttcaatcatccgttggccggtcaatctatcagctttgatatagaagtgctggagattgatcctcaacaggaggaatctcatgcaaatactgctggctaatccacgaggcttttgcgccggagtcgatagagctatcagcattgtagaacgcgcgttggagatgtacggcgcgccgatctatgttcgtcatgaagtggtgcataatcgctacgtggtggatagcctgcgccagcgcggagccatctttatcgaggaaatatcggaagtgccagatggctctattctgatattttctgcccatggcgtttcccaggccgttcgggcagaagcccgctcgcgccagttgacgatgctgtttgatgcgacctgtccgttagtgaccaaggttcatatggaagtggctcgtgccagccgtaagggcaaagaggcgattctgattggacatgcgggccacccggaagtggaaggcaccatgggacaatacagtaacccggaagggggaatgtatctggtggaatcgccagcggacgtgtggacgctggaagtaaaaaacgaagataatctgtgctttatgacgcaaaccactttgtcggttgatgatacgtctgaagtgatagatgcgctgcataaacgcttccctaagattatcggtccgcgtaaagatgatatttgctacgctaccactaaccgacaggaagcggtgcgcaatctggcggataaagcggacgtggttttggtcgtcggctcgaaaaactcgtctaactcgaaccgtttagccgaattggcacaacggatgggcaaagcggcttatctcattggctctgctgatgatatacaagaaatttggctgaacaatgtttcctgcatcggtgtgactgctggagcctcagcgccggatattctggtacggcaagtcattgctcgcctgcaagatctgggggcgggtcactcaattgaactgagtggcagggaagagaatattgttttcgaagtgccaaaagagcttagggttaacgtaaagcaggtcgactaagttagccgaatataaaaaagcagccttggggctgctttttttatggcaaaagaaaacccaaggtaacggtttggatacagtaatgttaaatgagtttcttctggctactccttgaaaatgcatgaatatgcgtaaagatgcagcgctgaaaatttgcccgttttcggtttgttatgcagaaattgagagaattccatctgattatccgatgcgccggcgctttttacctgcaatagatgagtaattaagtgctttcactgataaaaatgagcggatatcatttttttctaatacagcttaaatagtctggcagactcagtggcagaccgctaatctgaaccctgatcagggctgatataaaacaacaagaggatttatgactgattcagcaattcgtgtcgctattgtcggtgccggtggccgtatggggcgacaattgattcaggccgtgcatcaaattcctggagtaactctgggtgctgcgctggagcgcaaaggttcgtcactggtaggcactgatgccggcgaactggccggtatagggttgctaaatatcaaggtggcagatgatgttgccgaagcaataaacagctttgatatccttgtggactttactcgtccagaaggctcgttggcgcatttggctctgtgccgccagcacggaaaaggtatggttattggtacgactggctttgatgaagctggcaaagctgcgattagcgccgcggcggcagatattgcgattgtttttgcggccaattttagcgtaggcgtcaatctggtccttaagctgttagagaaggccgctaaagtcatgggtgactacgccgatatcgaaattattgaagctcaccaccgccataaagtcgatgcgccttcgggcactgcgttggcgatgggagaagcgattgcggaaacgttagggcgcgatttaaaagactgcgccgtttatagtcgcgaaggttataccggcgagcgtaaggaagggactatcggttttgctaccgtccgtgcgggggatattgtgggtgagcatactgcgatgtttgcagatattggcgaacgggttgagatcacccataaagcgaccagtcgtatgacttttgctaatggagcaattaaatccgcaatctggctatcaactcaggataaaggattgtttgatatgcgagatgtcttgggtttaaacgatttataatatgtaatgtaccgctgtgatgtggttattcctatcataactatctgatagtagagcgatatttttatcgctcttttttattttgttattttaagtgttaagtggttattttattattagatggctgtttttgtgttttttaatgtgtttttcagcgttttattgaaattttacgactcctatcattgccaatttgccttttctctctccgaatacgttaaaattcactctatcaccctcgcaaccgtttactatgttaacttagtttgtatttttgccgccataaacccactattttggcgagatgggcaaaaaacaaagaaaaaatggtactttggctagacaagagcctagctcatcattaaaatgcgcccaatttgccaaaaattagctttgagggcggtttttgcattgatttagatcgttaattctgaattaatatgcagataatgtgactgtttattccttggagggtgttttgattaagtcagcgctattggttctcgaagacggaacccaatttcacggtcgggccatcggggcagaaggttcggcagtgggggaagtggtcttcaatacgtcgatgaccggttatcaagaaatcctcactgatccttcctattcccgccagatcgttactcttacttatccccatatcggcaatgtcggcaccaacgccgccgatgaagaatcctccgcagtacacgcccaaggtcttgttatccgcgacctgccactgattgccagcaactaccgtaatgaagaaggcttatccgaatatctcaaacgccgcaacatcgttgcgattgcagatatcgatacccgtaagctgactcgtttactgcgtgagaaaggcgctcagaacggttgcatcatcgctggcgacctgacggatgcggctgtggcactggaaaaagctaaagctttccccggtctgaaagggatggatttagcaaaagaggtcacgaccaaagaagcttacacctggctgcaggggagctggacgctggaaggcgaactaccggcggcgaaaaaagctgaagaattacctttccatgtagtggcttacgattatggcgtaaagcgtaatattctgcgtatgctggtggatcgtggctgccgtctgacggttgttccagcgcagactccggcggaagacgtgctgaagctgaatccagacgggatcttcctgtccaacggcccgggcgatccggaaccctgcgactacgccattaccgcgattaaacgttttctcgaaaccgatattccagtctttggaatctgtttaggtcaccaactgctggcactggccagcggcgcaaaaacggtaaaaatgaagtttggccaccacggcggcaaccatccggtgaaagatttggatggcaactgcgtgatgattaccgcacaaaaccacggcttcgcggtggatgaaacctcattacctgccactttacgtacaacccacacttcgttattcgatggttctctgcaaggtatccatcgtactgataaagcagcgttcagcttccaggggcaccctgaagcgagcccggggccacatgatgccgctccgctgtttgaccactttatcgaactgattgaagcctaccgcgcatcatcatcagcaagcactaatagcaagtaatcaggagctaagaccatgccaaaacgtacagatataaaaagcatcctgattctcggcgctggcccgattgttatcggacaggcctgtgagttcgattattcaggtgctcaagcctgtaaagccctgcgtgaagaaggttatcgggttattttggtgaactccaacccggcaaccatcatgaccgatccggaaatggccgatgcgacctacatcgagccgattcactgggaagtggttcgcaaaatcattgaaaaagaacgtccagacgcagtattaccaaccatgggcggccaaaccgcgctgaactgtgcgttggaactggaacgtcagggcgtgctggccgagtttggcgtgaccatgattggtgccaccgccgacgccattgataaagcagaagaccgccgtcgctttgatatcgcgatgaagaaaatcggtctggatacggcgcgctccggcatcgctcacaatatggaagaagcgctggccgttgcggctgacgtgggtttcccttgcatcattcgtccgtccttcaccatgggaggcaccggcggcggtattgcctacaaccgtgaagagttcgaagaaatctgcgagcgcggtctggatttgtctccaactaaagaactgttgattgacgaatctctgatcggctggaaagagtacgagatggaagtggtgcgtgataaaaacgacaactgcatcatcgtctgttccatcgaaaacttcgacgctatggggatccacaccggtgactccatcaccgttgcgccagcgcagactctgacggataaagaatatcaaatcatgcgtaacgcctcgatggcggtactgcgtgaaatcggcgtggaaaccggcggctccaacgttcagttctcggttaacccaaaaactggccgtctgattgttattgagatgaacccgcgcgtatcccgctcttcggcgctggcatccaaagcaactggtttcccgattgccaagattgccgccaagctggcggtaggttacacgctggatgaactgaccaacgatatcaccggtggccgtactccggcgtcatttgagccctccatcgattacgttgtgaccaaaatccctcgctttaatttcgagaaatttgccggtgccaacgaccgcctgacgacccaaatgaaatcggtcggcgaagtgatggcgattggccgtactcagcaagaatccttgcagaaagccttacgtggtctggaagttggcgcgaccggctttgatccaaaagtcagcctggacgatccggaagcgctgaccaagattcgccgcgagctgaaagacgctggcgcagagcgtatctggtacatcgccgatgcgttccgcgccggtatgtccgtagacggcgttttcaacctgaccaacgttgaccgctggttcctggtgcagattgaagaactggttcgtctggaagagaaagtagctgaatgcggtatcaacggcttgaattatgaattcctgcgccagttgaagcgtaaaggttttgctgatgcgcgtctggctaaactggttggcgtagccgaaagcgaagtgcgcaagctacgctacaaatttgacctgcatccggtttacaaacgtgtggatacctgtgcggcagaattctctactgatacagcctatatgtactcaacctatgaggaagagtgcgaatctaacccaaccagcgatcgtccgaaaatcatggtgttgggcggtggtcctaaccgtatcggtcaggggattgaattcgattattgttgcgttcacgcctcgctggcgctgcgtgaagacggttacgaaaccatcatggtgaactgtaaccctgaaacggtttccacggattacgatacctctgaccgtctgtacttcgagtcagtgacgctggaagacgtgctggaaatcgtacgtattgagaagccacagggtgttatcgtacagtacggcggccagactccgctgaaactggctcgcgaactggaagctgccggcgttcctgttatcggtaccagccctgatgccattgaccgcgcagaagaccgtgagcgttttcagcaggcggtgaatcgtctgggtctcaagcaaccggctaacgccaccgttgccactatcgaacaagcggtagataaggctagcggcttgggttatccgttggtggtgcgtccttcctatgtactgggtggccgcgcaatggaaatcgtctatgacgaaaccgacctgcgccgttacttccagaatgcggtgagcgtgtctaacgatgcaccagtattgctggatcgtttcctcgatgacgcggtggaagtggatgtggacgcgatttgcgacggtgagcatgtgctgatcggcggaattatggagcatatcgagcaggcaggggttcactccggtgactcagcttgttcattgccagcctacacgctaagcaaagaaattcaggatgttatgcgtcagcaggttgagaagctggcgtttgaactgtgcgttcgcggtttgatgaacgtccagttcgcggtgaagaacaacgaagtttatctgattgaagtgaacccacgcgctgctcgtaccgtacctttcgtttctaaagccaccggtatgccattagcgaagattgccgctcgagttatggctggcaaatcactggcagagcaagggataaccgaagaaatcatcccgccatattactcggtaaaagaagtggtactgccgtttaataagttccctggcgttgacccgattcttgggccagaaatgcgttcaaccggtgaagttatgggcgttggccgtaccttcgcagaagcattttcgaaggcgatgctgggcagccagtccggtatgaagaaaagtggtcgtgcgctgttgtcggtgcgcgaaggggataaagctcgcgtggttgatttggctgccaagctgctgaaacaaggcttcgaactggatgcaacccatggtactgcggtggtgttaggggaagcgggcataaatccacgtttggtcaacaaggtacatgaaggccgtcctcacattcaggatcgtattaagaatggcgagtacacctacattgtcaataccacggcgggacgtcaggctatcgaagactccaagctgattcgtcgcagtgccttacagtataaagtgcactatgacaccacgttaaacggtggtttcgcgacggcaatggcgctgaatgcggatccaaccgagcaagtgatttcagtgcaggaaatgcatgccaagattaagcaaatgaaaggttaatctgggtaagcgcaaaattgaaaggcgatggaaacatcgccttttttgtgactgaaacaaagtgaatcaactcagggcgactttaatacccagaccaatcagtaaaccgccgagaaccttatccaccagtttttgtgctttcgccagcccgcgccgaaccggagcgctttggatcaaaatgaccagtattggccaccaaactactgctaatcccaatatgatcgaggcgtaccacagtttttcgccgataccggagttaatctgaagtatctgggtgaataccgcgagaaagaatagcgttgctttgggatttagcaggttgcaaaggtagccctgcagaaaggcattcttcatcttgatagtttgttgtggcaaatggctgatattcattttgctttctccgcgtgagagaagcgcctgaatacctacccaaattaggtagacagcaccggcatatttcaggaaattaaataaccacggggtagtggtaataaccaccgccaggcctgctacgcagtaagacatgtgagtcgccacgccgcaaataacgccaaatgcggtcatcatggcggcagaacgacgatagcgagcggcattttttatgaccagaaagaaatcagggccgggagaaagcatccccaaagtagcgatagtggcaacaaataatgaagtttcgagcatcagggaattccgcaatgtagcagggtaataggtgaataatagcgctgtcccagttccctgacatcaccttaatgggtaagaaattaaaatcaacgtttcactcttttgacaggtatcgatacagaatgatgagccaggagaatgcaatttgtcagggtataccccatcagcagcagcgggagattacccggctatgtatacaatgtgccctgttattgttacagcatggcgcagaaagcatgttggtagaacaactctccgctcgtctggggattgccttgggaatggatagcgttgaaagctcgatctctgctaacgcggtggtattaacgactattagccaagggaactgcctgacctcgacccgaaaaaataccgatcgcggcattaatatgcaggttgtgaccgaagtacagcatattgttattttagctgaacaccgtttgctggatgctcaggatgttgcaaaacgcttagatcatattcggccactacgttatccacgttggctggtggtagcgatggtcgctttgtcctgcgggtgctttagtatgctaaacggcggcggttgggatgccttttctatcacttttatcgccagcggcgtgtcgatgtttgtgcggcaaagtttgacagctcgtcatatgaatcctctgattaacttctgtattacggcattcgttgcgacttcggcatcaggtttgctgatgcgcttacctcagtttgaacaggcttccagcgtagcaatggccgccagcgttttactgttggttcccggattcccgctgattaatgcggtcgcggatatgtttaaaggccatgtgaataccggactggctcgttgggcaatggccagcctgttgacgttatcgacctgtattggcgtggtgatcgccatggcactgtgggggctgcggggatgggcatgagtttattatgggctttgctgcaagatatggcgctggcggccattccggcattgggttttgcgatggtgtttaacgttccgattcgggcattacgttattgcgcactgttgggcgctatcggtcacggttcgcgtatgctgatgatgcattttggtatgaatatcgaattggcgtcgctggtggcttcaatcctgataggcgtgattggtattagctggtcgcgctggctactcgcgcacccgaaggtatttacggtcgctgcggttatcccgatgtttcccggtatttctgcctatactgcgatgatctcggtggtagaaatatcccatttgggatacaccgaggagttgatgtcaacgatggttaccaatttcttaaaagcttcatttattgttggcgcactatcgataggtttatccttgccaggattatggctttatcgtaagcgcccgagtgtataggctttttttccgaggtcagcagtcccatcgctaagagctgtcttatatgtgctgttagcctgattatgactatcgacggctgataaggctttacgtatagtgtgagcaatttttcgggactggctaacttagcctacagggtttaataatgattatcagcctgatcgctgcacttgcggcagatcgtgttattggtatggaaaatgccatgccgtggcacctaccggctgatttggcgtggtttaaacgtaacacgctgaacaaaccggtaattatgggtcgcaaaacgtttgaatctattggtcgtccacttcctggccgtctgaatatcgttatcagcagccagtcgggcaccgacagccgcgtcagctgggcaacttcaatcgacgaagcgctggctttagccggtgacgttgaagaagtgatggttatgggcggagggcgggtatatagccagttcctcgatcgcgcacatcgcttgtacctgacacacatcgatgctgaagttgggggcgatacacatttccctgactatgaacctgatgaatgggaatcttcattcagtgagttccacgatgcagatgaagctaattcacatagctattgctttgagatattagagcgtcgctagtttttaccgaactggattaattcaataggaggcctatatggcctcctttttttatcaaaaaatgcctgtctattattatggttctcgttattaaattagaaaatgccagagttcaatctggttgatatatttatttttcctttcaatgctaattcttactttatataaatgggagtgttaaatgcgaaaaataaatatggtaacgattctacctattattctatatagccacctgttatcagcctctgtcaatcattgcccagagccgagtgaaattgatggggctaatggtatggggttatattttacggcaaatagtcagtggcttggagtatctcaaggcgctgagaataatggaaaagtttctcattttttacgggctacctaccatccttataatagtaacgctgagactataggtattttaactagctgtagctatgcccttgaatctggaactatagatatgcatatgaaagattatgagtcgataaaaaacggtggcttttttgtttctctgaaagggcatgagccttgggtgaagacgtcatcgacgttaacgggagataaattcgtttgtcagtctgatgatgtgaaatattgtacttttgaccggttggattattaccaaatatgccagtttcagacggaaaataatagctagagtaatgtaatgaatactaagaaaggctaactgttaatcactattattttgatctatcttttttgagagtctccgagtgtcatttatttgtcataagtgagacttattatttctatgcatctgcttttatcaattaaaaataagggaaaatacttatggtaaatgaagttatgcaattgaatgaagatcgattgatcaatcgtgcaggacgagaactgcgtgcagataatattgataaaataggtttagttggaattcttggcggcggaatctggcctgcctcaatcgagagcgacagcttcgacaacatgcttcaaagcagtgcggttacggataggaatttttggcaagagtagttcggtgcgcaatgtcattctgaaaaatgagaaatggcacaaataaatacgtgccatttcatcatattaaacgaggttaattagccgctgcgatgctgacgtcagtgcctttttcgcggaaagattgctgagtgaaatagcgcttatcttcccagcgcagcatagtcagcacgcctccccagcaacagccggtatccagcgcgtaaataccttccggagcgcctttcccttccagagatgcccagtgaccaaacgcaatggaataatcaggatcaaccaaccgaggcaaatcaaaccagggttttagcggtgatggcgcattctctggcgtatctttgcagatcatgtccaactgaccatttgggaagcagtaccgcatacgggttagagcattagtgctaaaacgcaaacgagccagaccagatagctcctggctccaattgtttggcatatcgccgtacatggcatccagaaatagtggatagctgtcgctactcagcaccgcttcgacttcgcgggcacaggtttgggcggtttcaatatcccactgtggcgtgattcctgcgtgggccatcaccagtttcaattcctcatcgacctgaagcaccggctggcggcgtaaccagttaatcaattcatcggcgtcttgggcttccagcagcggggtgatgcgatctttgggcttattgcggctaatgccagcataaactgctaataagtgcaggtcgtgattgcctagcaccatacgtacggccgggcctaatgcgcgaacatagcgcagaacatctaaagatgcggggccacgggcgaccaaatcaccggttaaccaaagagtgtcttgctgagtattaaactcaacttgcgccaatagggcgcgtagttcatcgatacagccgtgaacatcgccaatcaggtaggtagacatatttttcggggccggattagtggatcagcgtcgggatagccaaacggaagacgggaattgccgtacggaatgcctggcctaggtgatcaaccatttcgtagtgcccttccatggtacccagcggcgtttctagtaccgcgccgctggtatattggaattcattgcccggaagaatcagcggttgctcaccgataacgccttcaccttgaacttcggtctgacgaccgttgctattggtgatcagccagtaacgaccaaccagctgaaccgttgaacgccccagattgcgaatagtgacggtataggcgaagacaaagcgttcttcatcaggtatcgattgggtttccacatagatactttgtacctgcacacacacacggggccgttcaatcatggcgaactcctgttattcctgcggtgtcgattgcgccgaaagccagttagccagcttacagtattgcgccacagaaatgttttctgcgcgaagcgtcggattgacacctaattcggttaattgctcaggcgtaaacaaatcccctaagctattacgtacggttttcctgcgctggttaaaagcttgcgtagtaatgcggctcagcatacgcacatccccaaccgggttaggcatgttcacatgaggaaccagacgtaccacggcagagtctacttttggcgctggggtgaaggccgtaggtggcacttcaagaactggtatcacgttacaataatattgcgccatgacggttaagcggccataagccttactgtttgggccagcaaccaagcggtttaccacttctttttgcaacatgaaatgcatgtcgcgaatagcctgagtatagctgaacaggtggaacattaacggggtagaaatgttgtacggcaggttaccaaacacgcgtaatggctgacccgcctgttctgccagctcggcaaaatcaatcttcatggcatcttgctggtggatcgtcagcttatcttttagctgcggatggctggccaaacgtgcggcaagatcgcgatccagctcgataaccgtcatgtgatccatacgtgcagcaactggttcggttaacgcgcctaagccgggcccgatttccactaccgcttccccgggaacagggtggatcgcagaaacaatactatcgatgacaaactgatcgtttaaaaagttttgtccaaagcgtttgcgggcaaagtgcccttggtggactctattattcattgctgttatttatcattttaatggctaaatttaatgccgttttgaagctgcccacgtcggcagtgccggtagcagcaagttccaaagcggttccgtggtccactgatgtgcggataaaaggcagaccgagggtaatatttaccgctcgtccaaagccttggtattttaacaccggtagcccctgatcgtgatacatggctaatacggcatcggcatgttgcaaatatttgggctggaacaaggtatccgccggcaacgggccaatcaaggtcacgccttgctgacgcagctcgtctagcgcgggaataatgatatccagctcttcacgacccatatggccgccttcgcctgcgtgtggatttaacccacaaacataaatatgcggctgttggatgccaaatttggttttgagatcccgatcgagaatagtgataacttcgtgcaggttatcccgagttatagcgcgagaaacctctgacaacggtaaatgcgttgtagccagagcgacgcgcagctcttcggttgccagcatcataacgactttttggcacaggctacgctcggcaaaaaactcagtatgaccagtgaaagggacgcctgcatcattaataatgcttttttgtaccggaccggtgaccaaagccgcgaattcaccccgcaagcatccatcgcaggcctgagccagcgtttctaccacgtaggcgctgttactaaccgaaggaacacctgcggtgaccggagcggcggcaacgggcaggatggttaaggttcctgcccgctgggcaaggccagcttcatcgggttgatattcccgcaattgcagagggagcttcaattgctccgcccgttcaagtagcaaggccggatcggcgcacacgactaactcaacaggccagtcctgttgagccagagtgatcaccagatccggcccaaccccggcaggttcgccgggggtaatgacaatgcggttatttttgtgcatcgctaccatcaagaatcttcacataagaagcggcacgttgttcctgcatccaggtttgcgcttcttcagagaatttacggttaaacagcatgcggtaggcacgatctttctgcgccgcatcggttcggtctacctgacgggtatcgactacctgaatcaaatgccagccgaaagatgaatgaaccggcgcactgatctcgccttttttcagtttcatcaaggcatcacggaaggctggatcgtagatgtcgggagaagcccaacccagatcgccgccttgtaccgcagagcctggatcttcagaaagtcgcttggcttcatcggcaaaggttgccttgccgcttttgatatcattcgccgctgcctgtaattttgcgcgtgcctgatcgtcggtcatcacaacggatggtttaagcaaaatatggcgagcgtgcacttctgtaaccgaaacggtttgatttgtgccgcgaatatcattcactttcagaatatggaaaccgacgccggagcgaatcggcccaacaacctgacctttgctggccgtttgcagtctttcagcaaatagcgttggcaattcctgtagcttgccccaacccatttggccgcctttcaatgcctgagaatcggcagagtttgcgatagccaatttgccaaagtccgcgccatttttgagttccgcgaccagattttttgccaagtcttcagcggtatcaacctgctgttgggatggattttccggtaacggaattaaaatgtggctcaggtttaattcagcgtcatcgccggtctgggctgcgatctgtttggccagtgattcgacttcttgcggtaaaatggtgatgcgacggcgaacttcgttatttcgcacttcggaggtcagcatttctttgcgaatctgggcgcggtaagtgttgtaatctaacccttcagcggccagacggctgcgcatttgtgccgttgtcatacggttttgcgccgcaatatcagcaatggctttatccagcgcttcgtcggaaacggtaatccccattttctgtgccatctgcaattggatattatccataatcaggcgttccagaatctggtggcgcaacgtgccttcgtcaggaatttgctgaccagcctgttgcgcattgagttttaccgactgtaacaaaccgtcgacgtcactctgcaagaccacaccgttattaaccacggcggccactttatcaacttcttgtggtgctgcgaacgcggtattggcaccgatcaccaatccgagaataagcgttctccagttcttcataccttttccattatgtaatccgcagttgcgggtttaaattcactgaattcagtgtgttactcagtatcagaatgcgctttggtaaggcaggataccagagcgtaacatctgttgggtacccaaactgtggttgctgcttaaaccacgtaactctatgttaaacgagattttgttatcatatttactggtattgtccagcgtgttccagccgttgattttacgctcatagcccagattaatcgcccaacagcaggtattgtactgtaccccaaccagttggctagccggttgattggccttagtgtcgtaatagtatgacccgacgatagcccaacggtcggccaacggtaaactggccactgcacccacttgagaaataccttcctgatagccctggcttctcaccttaggtaccgccgcctgaatatattcagggctggcgtagcggtagttcaactgaagcaccgtttcggcattgtggcgatattccatcactgtattaccctgagtcagacttcccaagcgggtatcgtactgcgctccgcctctaaagccccacttatcggtaattttccaataggtgtccccggcccataccaggctaccggtatcattgctgttgtcgatattggctgagtttttattattatcaccggttctggaaggggtgaaataatagatttgacccaaggaaacgttaaaacgttcaaccagcccatcatcataaatgcgagaagttaaaccggtagcgatctgattggccgatgcgatgcgatccaacccgccatatgtacggtcacggaacaggccggtatagtcagtttgcagcagagtggtgtcgtaaagatagatgtcatcctggttgcgataaggcacatacaaatattgggctcgtggctccaaagtttgcgtatagccttctgcccaatccatctggcggtcaaataccacttttccatcgactttaaactgtggcagaacgcgattgactgaatcttgcagttctggagccacaccaccgttattcgccacataattacttgaaaaaccagtgggaatatcttgctgatagtgagttgccatcagcttgatttcggtattcaggctcgcccaatcgttcgccagaggaagattgattgatggctcaatatggaaacgatccgccttcggattattcggattcacgctggtgaatttaactgcttgcccatacacccgcatatcgaacgggcctacatcgtttttgtaataattgagatctaactgcggctgggcgcggtaggcatttgagtcaccgccaccattggcgaatacttggaactgtttggatgacaatgtagcgtcccagtttttctgcgcatagcccacgctaaaaatttgcgtggcgtagccgtcagtactggaaccataaagtgaagtgaagtctctaaagtaagtcggatcgctgactttggtatagtcgatgttaaagcgccatacctgatccatgacgccagaatggccccagtagtagagccaacgagctttatcattattggctttgtctgcgctggcatattcgcggtcgcttgatagccagtcgaatgccatggtaccagcaccgggggctagcaaatagcggaattcgttctggaactgagtgccgcgtttctcaatgtagtgaggtgtaatggtggcatcaaagttcggcgcgatgttccagtagtacggcaacatgaattcgaagccgttattggtgctgtaacgcgcattcgggatcaggaaaccggagcggcgtttatcgccaacgggcagttgcatatatgggctatagaaaaccggtaccggcccgattttaaagcgtgcattccagatctcggccacttgttcttcgcgatcatgaatcacttcgctacccactacgctccagctgttatcaccgggcaggcacgaggtaaaagtaccgttttccagaatggtatagcgattttgaccgcgcagtttcatcagatcggcatcaccgcgaccctgacgccctaccatttggtagtcgcccttatccatattggtgtctttggtgttcagatttgaccaggcttttggccctttcagaataatctgcggatcgtcgtaattgacatcacctatagcggtgacggttcgcaccggaatcggctggccgggttcctgtgtctggtgtaactgaacctcattggccgttagggtgctgttaccctgctggacattaacgttaccggtgaaaaccgcactgtggggataattgccttcggttttatccgcttggatatgcaccggaagctggttggtatcgcccgtaaccagcggtttgtcataggtaggaacgccgaacatgcattgttcagcgaggtcggccagcgattgctgactatagagtgccgtccatatcaacgtggccagcagtgttgggaatctttttttcatacgcgcttttggtgttccgtcatcaggggcaacgtgccggcaaacggtctgagactatctcactcatcagagttgcgctagtgttaaatccggccgtttacacgtctcgccgttaggcacagagctaaatgccgagtatgataatgcaaaatttgactgacggcatgatgaattgaggagtatatgcagtattggggaaaactgctcggtctgatattgggattgatgtccggtattggtttctggggtgtagtactggggttgatcgtcggccatatggtagataaggctcgaaccgcgcgacgccgcggctttttcgtcgatcagcaaacgcgacaatcactgttttttcgcaccacatttcaggttatggggcacctgaccaaagccaaaggacgcgtaactgaagttgatattcagcttgccagtcagttgatggatcgtatgcaattacatggaaatgcccgcacggcggcgcagcaggcgttccgtgaaggtaagcaaagcgacttcccattgcgggaaaaactgcgtgaattgcgcagcgtttgcttcggtcgtttcgatcttattaggatgtttctggaaattcagttacaggctgcttttgccgatggttcgctccatccgaatgaacggcaggtactgtacgttattgccgatgagctaggtatttcccgcagccagttcgatcagtttcttcgcatgatagaaggtggtcgtcagtttggtgggcagggtggttactctcaagggggctaccagcaggcaccgcaagggccaactctggctgatgcctgtaaagtgctaggcgttaatccgagcgatgatgccgttgccatcaagcgtgcttatcgcaaattaatgagcgaacatcacccggataaattggtcgctaagggccttccgccggaaatgatggaaatggctaagcagaaagcgcaggaaattcagtccgcttatgatttgattaagcgagaaaagggatttaaataagatcggatttttattgagatgcttatcgataaaatttgcggtcgcaacttttgtgccatttcattcgatattaaggaaggtaggacgccttccttaataattcatcaaacacgatacttactttaccgttactcatcacttaaaaatcggcttcactgcggaaatgcataggcgtgccgaattctggatgagtgatacataactcctgggcatgtagctgtaagcgcggagccatcgccttggcctctggaggggcgtagaagccgtcgccgaggatagggtgccccatcgccagcatatgtactcgtagttggtgcgagcggccggtgatgggcgataatttcacccgagtactgccgtctgcatcccgggacagcaccagatactcagtttgtgcagatttaccggtttcataacacactttttgcttcggtcgattaggccagtcgcaaatcagcggcaaatcaataaccccttcgtcctgcgccagatgtccccaaactcgtgcaatataagattttttcggctcacgttcgcgaaattgacgctttaattcgcgttcggcggctttggtgagtgccacgacaatcacgccgctggtcgccatatccagacgatgaacggattccgcagccggaaaatcagcctgaatacgcgtcattacgctgtctttgttttccggtgcccgtccgggtaccgaaagcaacccgctcggtttgttaaccaccataatatgctgatcctggtacaaaatatgtagccagggatcgcgcggggggttatagggttccatgttcaatccgttaccaccttgctgcaattcgaggttttttcgatatggcatatcagtctggataaaagagccggaggttgccggctctttcttacacaaaagtgttactggtgagtgaccacaaccaagcggattgcgtcaagacgccagccagcctgattcaggttttccagcaccattttgcggttatgctccagcgcttcgagttcgtcatcacgaatattcgggttaacggctttcaacgcttccaaacgtgccagttcggcactcagcttttcatcggcttcttgcttggcggtttcgatcagcgctttcgcctgttcttctaccagcgcttccgcctgttgcagcatggcgtgaacctcttgctgaaccgcgttcaccagcttgcttgaggtgtggcgattgaccgcattcaactggcggttaaagctttcaaactctacctgagccgccagattggtgcctttgcgatccatcagcatacgtaccggcgtcggtggcaggaagcgggtcagttgcagatgcttaggtgcctgagcttctaccacataaaccaactccgccagcagagtacctactggtaatgctttgtttttcaacagagaaactgcacagcttccggtgtcgccggacaaaatcaaatccaggccgttgcgaataatcgggtgttcccaggacacaaactgtgcgtcttcacgggataacgcctgatcgcgatcgaacgttacggtgcagccatcctgcggcagaccagggaaatccggtaccagcatgtggtctgatggcgttaatacgatcaggttatcgctgcggtcttcctgattgatgccgacaatatcaaacaggttcagcgcaaagcttaccagattgatgtcgttatcctgattggcgatagcctcggccagttcctgaccgtgttcgccaccgtttgaatgcatttccagcagacggtcacgaccctgctccagttgttgcttcagtttgtcgtgctgctgacggcaggtgtggataaattcgtccaaaccttcctgttcggctggcgtggccagatagccgatcaattcctgataggcgctgtcataaatggttcggcctgtcgggcaggtatgttcgaaggcatcgagaccttcgtgataccagcgcactaaaatcgcctgtgcagtattttccagataaggcaccatgatttgaatttcacggttctggccaatgcgatccagacgtccgattcgctgttccagcagatctgggttaaacggcaaatcaaacatcaccaactggcaggcaaactggaagttacgcccttctgagccgatttctgaacacaacagcacctgggcaccgtcttcttctgaggcaaaataagccgctgcgcgatcccgctcaatcagcgataaaccttcatggaacacggcagcgcgaatcgcctcacgttcacgtaagacctgctccagttgcagcgcggtggcggcctgagcgcagataaccagcactttctcatcgcggttggcgatcaggtagttcagtagccattcaacgcgaggatcaaaattccaccaggtggcattttccccttcaaattcctgataaatctgctcgggataaagcatatctttggcgcgagcttccagcgatttcttcgcacccataatgccagagactttgatcgccgtttgatactgggttggcaatggcagttttatttcgtgcagtacgcggtgcgggaaacctttcacgccgttacgggtgttacggaacagaactcggctggtaccgtggcgatccatcagcatgtcgactagctggcggcgcgccgcttcgctgtcttctccgtcgctgtttgccgctttcagcagcggttcgatatcctgctcggcaatcatttcacccagcatattcagcttgtcgtccgccagacgctcgccgcccagcagtagcgtcactgcgtcagcgataggacgatattgctgttgttcgctgacaaaatcttcgtaatcgtggaagcgatccggatccagcaggcgcaaacgggcaaagtggctctgttggcccaattgctcaggggttgcggtcagcagcagtacgccagggatattttccgccagttgctcaataacctgatattcgcggctcggggcttcttcgctccaggccagatggtgggcttcatccaccactaacaaatcccaggatgcgtcggccagttgctctaaacgttgcttgttacgacgtacgaaatctaatgagcagataaccaactgttcggtttcaaatgggttgctgctgtcttgcatcgcttcggaataacgactgtcgtcaaacagtgagaagcgtaggttaaagcggcgcagcatctcaaccagccactggtgttgcaggctttccggcaccacgatcagcacgcgctcagcgcgaccagccaataattgctgatggataatcatcccggcttcaatggttttacccaaaccaacttcatcggccaacagtacgcgtggagcgtgacgctgaccgacttcgtaagcgatatgcaactgatgaggaatcaggctggcgcgaacgccgcgcagaccgctccacggtaaacggaactgctcgctttggtatttacgagcgcggaaacgcagggcaaaacgatccattcgatcgatctgaccggcgaataggcgatcttgcggcttgctaaaagtgagtttgctatccagcaacacttcacgcattgctacgccggtttcctcggtatccaaacgggtgccgatataggtaatcaatccgttttcgtgggtgacttcttccactttcatttgccagccttcgtggctgctgatggtatcaccggggttgaacatcacgcgggtgattggagagtcatttctggcatagaggcggttttcaccggttgcagggaacagcaaggtgaccatgcgtacgtcgatggctacgacagtacccagtccaagttcgctttctgtatcgctgatccagcgttgaccaagtgtaaaaggcataaattatcggctcgattttgggttgggcagttatttgtttaactagtctgtgtgtttgataaggttggctttattcactataaatttaattttattgtcgacgaatgacgccaacccttatcaactaactggcaatagtttaccgtccgcgcaggctgatggcctaagaatctgcctgaaaaaacgtgacaacctgtgtgacgtaggtggcagagtccgtttgcacggataaataacgacattatgattgatgcgcgatttggcaagggcgctatggtaatggaaggcgcgcccgtcgtcacctgtaaaaccacggaaaagtgattaaaaaagtcccatttgaccagtaatcaacgttgtaaaatcatcctgcagaaagggtagtatagcctcggctacgggttgtagctggcgggagaggtaatgatcgtaatcaatgggggaatgacgaatttccagcggctccgggccagacgtggtcatcacatagctgatccagccgccgttttggtattgcaaagggcgtccttgctgacgattaaactcatcggccagacgagccgcacgggcatgaggtggcacattgcgctgataatcatccagctttcttcgcagccgtttccgataaaccagcagatgatccagctcgccgttcagggtttgcgccacgtaatcgcgaatgtagtcctgatagggttgctgttggaatatacgttgataaagttcttgctgaaaagtctgagccagcggcgtccaatcggtgcgcacggtttctaaccctttgtacaccatacgatcgccttcgggcgtggtgaccaatccagcataacgttttttactgccttgctctgcgccgcggatggtgggcatcaaaaagcgccgatagtgagtttcaaactccagttctaatgcgcaggacaggccaaacgtctcgtgcaaatgtcgttgccaccatgcgttcacgtattccaccaattctttgccaatctggctggcttgctcgtcgctatgggcgtgtttcagccagacaaaggtggagtcggtgtcgccgtaaatgacctgataaccgcgatctgcgattaattcacgcgtttggcgcatgatctcgtgaccacgcagtgtgatcgaagaggccagccgaggatcgaagaaacggcagccgctggagcccaatacgccgtaaaacgcattcataatgattttcaacgcttgagataacggcttatttttctgttgtttagcggcttctcggccttgccagatttgtttaacaatggcgggtaggcagtgtttctcgcgagaaaaccaggcgttgcgaaaaccgggcactgaatgcgcaagcgttggctgatgcatgccttcgactaagccaacaggatctatcaggaaagttcgaataatcgacgggtacaggcttttgtagtccagcaccagcaccgagtcgtacaaaccgggctgagaatccatcacgaagccgccggggctatgttcttccggtaactcccctaaattcggcgcgacataaccggcccggtgcatgcgcggcaaatacagatgagtaaaggccgcgaccgacccgccgctgcgatcggcggccagaccggttacgctggctctttccagtaagaagctgagcaattcggttttggcaaaaatccgcgttaccaactcgcagtctttcaagttatagcgcgctagcgcaggtttatcctcagcaaagcgacgattgatttcatccattcgttgatagggggaatcgctatctttgccttcgcccagcaaggtttgcgcgacggattccagactgaaagagggaaaattccaggtggctgatttgagcgcttcaatgccgtcgataatcagccgcccagcggctgaggcaaaaaagtgcccctgtttaaaaccgtgctcgcgccattccagtgggttaccgccacgaccaaaacgcagtggaatctgatagcgatccgcatgtttttgcagtacccgcagatcaaattgcaccagattccagccgataatggcatcgggatcgtattgttccagccattgattcagtttttccagtagctgcggacggctggcaacgtattccagattgaaatccaacggttgctcatccccattttgcggccccaacatataaacttgacgctggccgcagccttccagtccaatactgtacaactcaccgtgctcgctggtttctatatccagagacagcagttttattggtggacgataatcttcggctggtttcattcgggtggacaataacgtgccgtttttatccggtagtccgctaaaccacactggtgcggtaataaaacgttccatcaggtagcgttccggcgggcgaatgtccgcttcgtagacattcactccgccttctttcagcagcttttccagccgcatcagctgacgatgttgttggcaatacagccctaaaaccgggcggcggtgaaaatccgtcagggaaagcggccgtaactgatagcggcgctcatcccgcaggatttgctctgccaacggcgcttgctctgcgggaataaaggccacggaaggctgaggcggcagccgaaccaactgtggcccattatcggttgccaaccagaattcaacttcagtgcctgccgctgtatcccgccaatggcgggtgagcaggaaaccttggcgcgcttgatccaccggattacctttaatgaatgctacctttaattcatgatgctatgaatgagtgttaactgccgtgtcttttagtatggttttttatacagtcattgtctatttgaatggttgccagatagcttccgtatgtttccaatagatttcgtcgcaaacactcaatcagttgaatcacagtgaattcagcagcagtacggaaatagcccggaaaaaatcattgattgacgggactatgaggtagctggacaatccctcgcgctttatacaatggataaatttatggaagcctatttagaacaccttttgacacaatcactggctttcacgctatttgtcgtcatgtttgtcacatttatcgaatctttagcgctggttggccttttgttgccgggaacggtgatgatggcgagcgtgggggcgttaattggaagcggtcaggttggattttatccggcgtgggcggcggggattgtcggttgcctgttaggagattggatttcctactttatcgggcgggcgtttaaacagccgctgcaccgttggtcatttctgaaaaagcataaaactatgctggataaaaccgagtatgcgctgcatcagcacagcatggcgacggtgttgatcggccgctatattggccccactcggccattggtgccgatggtcgccggtatgctggatctgccgccactaaaattcgctttgccaaatattattggttgcctgacttggccggcggtgtatttcttccccggtattttggctggagtggcgattgatatcccgcccagcgccaatagtttcatgtttaagtggctgttagtcttagtggcggtaaccgtttggctggcgggatggttgggctggcgctgggttcgctacggcaagcgtaagccagatcgtctgagtcgttggctgccgctggcgcgtttacgcgggttaaccatattgatgacgctggcggcaatcggcagctttatctggctgcacgtacagccgattatgccgatttaccgccatttgctgtggaaagtgttagccggttaaagttgaggtaatgcccagtacgcaggcctcagccaccgaaccttccaccaatgcctgagtcgggccatcgtaatagatgcgcccgtccactatcagtaacgttcgttccgcaatccgcgcggcatcgtccagattatgggaaaccataagcaaagtcagttggcgacggtcgcaaacctgttccagcagttgcagcatttcggtgcgtaatgccggatcgagtgcagaaaatggctcatccaataacaggatcggctggctgcgaaccagacaccgcgccagcgccgctcgttgccgctggccaccggaaagctgtgctggcaagcgatccagacagttctccaatcctacctgttgagcaatttgctgcaataactggcgttgttggttattcagctttaatcccggatttagccccagcccgatgttttgctcaactgtcaaatgtgagaataaattgttttcctgaaacagcatggaaaccggtcgcttagctggagggctaccgctgtgctcttggttattcaatagcatacgaccactgactggcgtaaggaacccggcgattaggctaagtaaggtgcttttacctgctccgctggggccaagaatagccacgcgctcgcccggattaatttgcacatcaaagcgcataggcaagtggtcatataaataggtaattttctcaagctttagcatggcggcccggcaatttctcaataagggtaaacaggaggaaacacaataacagtagcagtagggcggttaccgcgccgtcgttgctgcgataggcaccaatttgctgataaagatagaacggcagggtacggaaatgctcgttgccaaatagcgcgacgacgccaaaatcaccgatagatatcacgctggcgaaggcgagtgcctgagctaatggacgttttaaggcgctaaattccacccagcgcagtcggtgccaaccacggatatccagcgacaggcatagcgggccgtagcgttcagccaaatcgcgcatcgggttatccagtactttcagcgcataaggcactgcaatcagcgcgttggtgagaatcactagcgcgtagggggattggggtaaacctatggtgtcattgagcaacaggaagaaaccggtggctaaaacaatgcccggcatcgccaatatcaccattccgctcatttccattgcctggccgaataccattttatctcgcaactttaactctcggctgctccacagcaacatcatggtcagcagtacgcagagcaatccagcagccacggcgatagtcagcgaggtcgttaaagcctgccatagcgccggttgttgtaatacgctaaatagggttttattagtgccgtcaatgaccactgccagcagaggtggtaacagcaataatagcgtgccgatgatgagtacgctgtcgctaacccgttgccacaggctgtcttgcgggttacgccagctttgagcatgagtgtttcccaccgctagcgcgctatttagccgctggctcagtagcaccaaccccagacagcaaccgagctgaatcagcgccagcagcgccgctcggcctaaatcgtagtcgtagctaagcgcctgataaatagccagctcaatggttgtcgcctgtggcccgccgccaagagacagcacggtagcaaaactggcgaagcacaacataaagatcagcgcggcagtaggcagaatctggcggcgcaaataaggccattccacccagcggaaatgctgccaaccgttcattcccaactgagcggccaattggcgctgttccaccgcaatactttccagtgattgcagtaacaggcgggtagccagcggtagattgaaaaagacatgagccagcagaatgccttgcaaaccataaggggaaaaatggtaatccagccctagccagccgaaaagttgcgctaaccagccttggcgcccatagacgctcaaaataccaaatagcgccaccaataccggcagaactaaggtcatggcgcataatcgcagcaacagttgacggccgggaaagcggcggcgatacagagcgcgagccagcagaatagcgggagccaccgagaacagggccgataaaaaagcctgccagaaggtaaagcgcaccacgtgccacaaatagctgtcctgccatactccgatccagtcggcttctggggcatgacgccagatggcgctaaatgccagcagcgccaccccaaccagcaggaatgaagcaactagtcccgggcagagccaagcggggattagcggctgacggcggattgccatgcctgaatccatttgctgcggttatcggctacttctttcgcgctgaattccaacgcttttttgggcacggtcagagtgttaaacccggccggaagatccattttaatcacgggatacatccagtttccggtaggaatatggttttggaaagccggagaaaccataaactgcatgaatttctgcgccagctccggttgtttgctcgaggctacctgcgctgcgacttccacttgcaaataatggccttcactgaaatcagcagcagcgtattgatctttcttttcttcaatcaaatgataagccggagaagtggtatagctcatgacaaaatccgcttcgcctttcaggaacaggccataggcttcactccagcctttggtcacggtcacggtttttttcgccagtttttgccatgccagcggcgcttcgtccccgtagactttctgcatccataacagtagccccagccccggcgtgctggtgcgcggatcttgataaataaccttccacggcgagtcattttcgatcagttcatgcagacttttcggcgggttttttattttttccttgttatatacgaaggagaaatagccgtagtcatacggaataaatgtgctgttatgccaggcttcggggagcgccagcttgctggtatctatctgacttggcgtaaataatccggttttctctgcggattgcaccaggttgttatccaaccctaatactatgtccgccggacttttctttccttccattcgcaggcgatttaacagagaaacgccgtcttccagtgcgacgaatttcagctcgcagttgcattctgcttcgaaggattttttgatagcaggacccggtccccaatcagcggcaaaggaatcgtaggtgtaaaccgtcaggacaggtttggtggcttcagccgcggtggcggcggctgaaatcagcagcagacagggaagaattcgtttaaacactttgcactcctcaaaaagaaaggtggcaaaggtatctgaggcattggtcaatatccgcaagttcatcatattgctgaatgacgctctcaaatcccttcgccggtattaaccggatcaggttcgacgggtttactctcagcgaatattggccgcggtttgccgctaaacaatttttcgcaccccgttgagacggcgctattgtagagggatagccagactagtgaaagtctgtttattcctccggcggcgtaaaccaggccgatttgaaatcaaaccagcctagggtattcatccgcacgccacgcatgctgtgctgtccaaacaattctagccagtgatggaataacgggtgaaattgatgattgctgaccaatcgttggctccattccgccatgggcaaccggttattgcgccactgcgcgacgtcttgatacaactcttcactcaaacagtgttgcaaaagaggaagttcatataaggtggcaaaaatggaaaattccaccggcagatagaagttggcgctacctagccagatatcgcttttggcttccccccgataccagctggcgtaatccagttcttgtaccaccagtttcacgccttgcgcggccagtacgtctctcagcgtttggctaatggcgttgaattcaggatgttcggtaaaacaggttacggtgagctcagttaattcgaggggtttggcagaaggtgggttcagacgattatggtgccagcgcggcaaaataccgtaggctggcgaccagtagcgctgatacaacgcatcggcatggctgagtaaagccaccggtgtgatcagttcacatagccagcgtctcacgtccggttggctggtgagcggggagcgttgatcgaaaaggagaaagtagcagccttcttccagccgactttccaattcgttgcggctggtatcatccgcctgtaaatgaacgccagaagacactaaatcttctgacaattcaggtaacacccaaatattgacctcatcaatgagtgcgcgaaaaccgaagtagttatcgaaagcctgaattttaaattgattttgccggttgcgaatcaccgagtaagggccggtgccgataggataacgcgaaaaatcaggtagttcaggccattcctgcggcaaaatcatggcgtgaacgctgcccagtagccaagggagccaatagtctggcgtattaagttttacatcaatgacataaggcgtaggagaggtgatttccgtgatgtgggaaaacagcggctgtgtggtcaaacgctttaatgacgtaatcacatcctgcatttctaattcacggccgtgatggaagtgaatcgctggacgtaaataaaagcgccaatgcaagggggttagcgtttgccagtgatgagataaatctggctcggcttccccattttcctcatttatgcgggttaaaccattaaaaatctgccggacaatatgggtttctgaacggcgcagagcggaaccgggcaataggttttgtagttgacggtagtaaagcactctaagtatatgtttaccttgtctaaaactcctccctagctgtgaaagaagcatctggcgaaccgcctgtttatctcccaccaattgcacgagctgatcgatatgatcctgctccagcaactcctctgcccgttgctgttgcagggccagaccggtgtacaaaaaggtgagctgcgagcgttttcctcgaccagcctctgcctgccagcttagccaacccgcttgctgcatattacctagtaacgaacgaacgtggcgacgcgagcaatttagcacttccgccaattgttgcagggtggtttccgtcggtttaccgccgtaatgttgccacaaacggatgaactggtgttgcaggcgagaagtagacataaaagaggaactccacggcaaaatgcatcaatttatctttccctatattacgcagataattatcagtaatgaaaggggaggagcatgatgaaaaagtgcttaaccagacagttttatcagcgctattttagacacgtcagacagcagcaggccgattggttgagctgggtaccgatggaatggcggttaaggatgctggcagatgtcacccaatgggacattcagcacatgccggaaaaagaataccgcaaacatatttagttcgaaccgggttagtaccgatggaatttggatttaactttcatcgttcggcagggacgctgcctattatcaaaaatttctgagtaatggtgcaattcaccagccagtggggcaacctgctggcttttttattgccgagtaatttttatctatagagttattgttgctgttcaccgcaatgtgccttctgtagcatatgaatctaaagtggtttctggcgatggagcctgtaatgaaatctgctctgacgtattcccggcggattaatcccgtctttattgctttttttgtggtggcttttctttccggcatcgccggtgcgctgcaggctccaaccctcagtttgtttttaactacagaggtcaatgtacgccctctatgggttgggcttttttataccgttaacgctatcgccggaattacggtgagctttgtgctggcgaaacgctcggatctgcgtggcgatcgccgcaagttaatcatgctgtgctacctgatggcggtgggtaactgcctgctatttgcctttaatcgtgattatctgaccctgattaccgctggcgtgctattagcctcagtagccaatacggccatgccgcagatttttgctttagcgcgggaatatgccgataactcggcgaaagaagtggtgatgtttagctcgataatgagagcacaattatcattggcttgggttattggcccgccgctatcgtttatgctggcattgaactatggcttcactttgatgttcagtgttgccgccggaatatttgtattaagcggtatcctggtatggttcttattgccatcggtaccgaaagctgaagtgccgaaagacgcgccggtagtgattaatgcaaagctttttgccgataaaaacgtgctgttgctgttcattgcctcgatgctgatgtggacctgtaacaccatgtatatcatcgatatgccgttatacatcacttcagatctcggtttgccggaacgtttggccggtttactgatgggaaccgccgctgggctggaaatccctattatgctgctcgcgggttactcggttaaacgctttggtatgcgtaaaattatgctgtttgccgtggccgcaggcatcgtgttttatgttggattgatcctgtttaaattcaaaactgcgctgatgttattgcagattttcaacgccgtgttcatcggtattgtcgccggtatcggtatgctctattttcaggaattgatgccgggcagggccggtgccgcaacgacgctgtttaccaatagcatatcaaccggcgtaattttagccgggatactacagggcgtgctgacggagaatctggggcattacgcggtttattggatggctgcgttactggcgacagtgtcattggggatatttagccgagtcagggctatctaaatcctctgcatctttcactccaccgcggtgttactgccttcagtcgtctcggtcacttggttgcgcgccaagtgaccgagcgtagcttgctgaaaattaacgtaaaaattcgggttgctgctgctcataggccgaaatattagcctcgtgctgcaatgtcaaaccgatactgtccagcccattcatcatgcaatgacggcggaaaccatcgatctcaaaggcataacttttgcctccggcgctgacggtttgcttttctaaatccacgacgaactcgataccttcctgactttctaccaactggaataaagtatcaatatccgcttcgcttaaagtcaccggtaataattggttattgaatgagttaccgtaaaagatatcggcaaaacttggggcgataaccaccttaaaaccgtaatcggtcagtgcccaaggggcatgctcgcgagatgagccgcagccaaaattttcgcgcgccagcaaaatagtcgccccctgatagcgcgggtgattcagcacaaattcagggttaggcacctgaccggcatcgtccagaaaacgccaatcgttaaacaaatgttggccgaagccagtgcgcgtcactttttgcaaaaactgcttaggaatgatggcgtcggtatcgacattcgctgcatccaacggaacgaccaaacctgtgtgttgaataaattttgccactatggtgtctccgattaatgtgtggacgcggataaatcgcgcacgtctgcaaaatggccgctcaccgccgccgctgccgccattgcagggctgactaaatgggtgcgcccgcctcggccctggcgaccttcaaagttacggttactggtagaagcgcagcgctcgcccggttccaaacggtcgttattcatcgccaaacacatggaacagcccggcaagcgccattcaaaaccagcgttgataaagatctgatccaaaccttcggcttccgcctgcgctttgaccggcccagagccaggaaccacgatagcttgtacgccctgagctacttttctgccctgtgcgatagccgccgcagcccgtaaatcttcaatacgtgaattggtacaggaaccgataaatactttatcgataggcacgtcagtcaacttaatgcccggacgcaagtccatataagccaaagctttttcagccgacgcgcgctcaaccggatcgctgaaagactcaggtgctggaataatctggttaacggcaatgacctgacctgggttggtgccccatgtgacctgcggtgcaatatccgctgcgttcaatgtcaccacggtgtcaaatttggcatcggcatcggatttcagcgtgcgccagtagatcacggcgtgctcccaattcgcaccggttggcgcaaactggcggcctttcaggtagtcaaaagtgacatcatccggcgcgaccaaacccgctttagcacccatttctattgccatattgcataaggtcattcgaccttccatgctcaaggcttcaatcgcgctgccgcagaattccactacgtgcccagttccgcctgcgctaccggttttaccgatgatcgccaatacgatgtctttagcggtaatacctgcgccaacttcaccgttaacttcaattttcatggtcttggcgcgaccctgcttcagcgtttgcgtcgctaaaacatgctcaacttccgaagtaccgataccgaaagccaaagagccaaaggcaccgtgagttgcggtgtgagaatcgccgcatacgatggtcattcccggcaacgtcatgccttgttccgggccgataacgtggacgataccttggtaaggatggttcaagtcatataaagaaacgccaaattcggcacagttcttgattaattcctgcatctgaattcgcgccatttcaccgctggcattaatgtctttggtttgggtagaaacgttgtgatccatggtagcaaaagtcttacccggctgacgtaccggacggcccatagcacgcaggccgtcgaaagcctgtggtgaggtgacttcatgcaccaaatgacggtcgatatacagcaatggcgtttcgttcggggcttcacggacgatatgcgcatcgtacaatttttggtataaggtcttggccatgttaaatcccctcagcgataaaggatgcgatgatatcgcccatttcattggtgccaatagcttccccatcacccgccaaatcagcggtacgatagccttgttcaagcgccagattaactgcgcgctcaatggcgtcggcggcatcgtcttcgcctaaactgaagcgtaacaacagtgatgccgataaaatttgcgcaatcgggttggcgatatttttcccggcgatatccggcgcggagccgcccgctggttcatacaaaccaaagccctgctcgttcagactggcagagggcaacatgcccatagaaccagtaatcatggcgcactcatcggataaaatatcgccaaacaggttggaacacagcaatacgtcgaactgggatggatctttaatcaactgcatggtggcgttgtcgatatacatatgggacagcgcgacgtccggataatctgcggcaatggcattcaccacttcgcgccacagaatagaactttgcaatacgttggctttatcaatcgaagtgactttactacgacgcttgcgcgcggattcaaaggcaatacgggcgattcgctcaatttcaaaacggtgataaacctcggtatcaaaggcgcgctcatacatgccttggccgtcgcgacctttcggttggccgaaatagattccgccggttaattcacgtacgcacagaatatcgaagccgcgggcagcaatatcgctgcgcaatgggcaaaactcttccagaccctgatacaaacgggcagggcgcaggttgctgaataacttgaaatgtttacgcaaaggcaacaaagcgccgcgctcaggttgttcgtccggcggcaaatgttcccatttggggccgccgacggagccgaataaaattgcgtcagcctgctcgcagccgttaatggttgtcgtaggcaaagggcaaccctgacgatcgatagcagcaccgccgacatcataaacgctggtggaaattcgcatgttaaagcgctggcggactgcgtctaacactttgtttgcctgtgccatcacttctggaccaatgccgtctccgggtaaaacggcaatatgataaattttcgtcatgttcacaccatttcctgagtattttgttgcaagcgctgtttttctatttctacctgctgagcgcgccagatgttatttaatacgtgaaccaatgccttagcggaagattcaacaatgtcagtggccaatccgacgccgtggaaacggcggccttgatgttccaccacgatatccacctgacccagcgcatctttaccctgacctttggcagataattgatatttcactaattcaatcggatattcggtaatgcggttaattgcctgataaacggcgtctaccgggccgttgccggtagcagcttcggattttatttcttcgccacacaccaatttcactgacgccgtggccatcacgctggagccagattgaacgctgaaatagtccaaacggtaatattccggttcttcctgttgtttattaataaaggccagagcttctaaatcgtaatcaaatacctggccttttttatccgccagtttcaggaaagcgtcatataaggaatccagatcgtaatccttatcctgatagcccatttcttccatacggtgttttactgcggcgcggccagagcgggaggtcaggtttaactgaacttctttcaagccaatggattccggcgtcatgatttcgtaattttcacgatttttcaggacgccatcctgatgaataccggaagagtgagcaaaagcattgctaccaacaatggctttattgccaggaattggcatattgcataatttactgaccaactggctggtgcggtagatctcctgatgattgatattggtatgcacacccagcatttcgtggcgcacttttatcgccataatcacttcttctaatgaacagttaccggcgcgttcgcccaaaccgttaatcgttccttcaacctgacgcgcaccagcctgaacggcggtgatggagttcgcgaccgacatacccaaatcgtcgtggcaatgaactgaaataatggctttatcgatgtttggaacacgatcatacaaattactgattattccgccgaactgataaggcgtggtgtaacccacggtatcagggatgttgatcgtggtcgccccagcgccaatcgcggcctcgacaatccggcacaagttatcgattggcgtgcggcctgcatcttcacaggagaattcaacgtcatcggtataatgacgagcacgtttgaccgagtgaacggccatcgccataacgtcttcaaacgtgcgctttaatttggattcaatatgtaacgtcgatgtggctaaaaatacgtgaatacggaaagcctcggcgatacgcaaggcttcggcggctacatcaatgtctttatcgacacagcgcgccaaggcgcagactctgctgtttttgatttcacgggctatggtatgcaccgattcgaaatcgccaggggaagaaacgggaaagccaacttccataacatcgacgcccatcctttccagcgccagcgcaatctgtaatttctctttcacgctcaggctagcctgtaacgcctgttcgccgtcacgcaaggtggtatcgaagataatgacttgttggctcatcgggtaattccttatttttctgagtaacttttttatttagcgcgcgacgggtaaaaaaaaacccgcgcatttgcgcgggtttctgaatcttgatggctgaatcagttctgatttccgtccaccaacataccgcgcaagtaagatgcgtttagtagtaggcctagtagacggttggagtagaacataattatcagtttctcatcggttaattgtttcgcttcctaatttgatacgttatttcaacaggagtgtcaacttttgtttgaagtggcgacttaaactggtttgaggtttttgtgcgtcttgtttttagcattaaatactatactgattaatattttggatttatattttgcttggttgtttttggtgttattgattgtttcacgagtgtgattaaaagtgggtgattatgcttaacattaatgctccgttcgattcctgcctcttagatgaatagttaacctttgtttaagtaaaattatcctctgacaaacttgataaggtggataaaaatgacagatagcattaatgtaataaggcatcttacgacgtccgctattagcgttacttaattaccataaatatatttatatataatgagagttagcatacacagcgtttatatttgtcaacctttagtttattaattcacacttaatgtttattatgtcaatgtaaaaaacttaaccatttaactgttgttagcttattttaagaactaataaggtttaatttatgaaattattatttaataatggcatgattatgaatcattgtatcttataaggtgagtgtttgtatgtcacttggaggttaatcatcacatttctggaaattagtgattccagtgataacatgccacgttccactttttatttatctatggaaactattctgacaataggatgcgttagatgtgatacgtggtttcacattttatacaaggacgagactcagtggttatctttcctaacgataacaattgagatcattggttatattaattgtgagacatctaatatatcagtaattaacttactgctgttaaaagatagtcatacacctaatagaaccatctgcataaagcttagtggagttaagcatgtctgaacacaacttggtaactgcaaatccagtaactcaaaaagaatcgtttgatgtccatttgcgtagcgttgatcttaatttactcacggtttttgatgccgttatgcaagagcagaacgtgacccgcgcggcgcaatctttggggatgtcacaaccggcggtcagcaacgccgtagctcgtttaaagctgatgtttgatgacgaactctttttccgtagcggtcgaggtattcagccgacagtccgagccaaacagctgtttggaccggttcgccaggcattacaattggtccataatgaattgcccggcgttgggtttgagccaaaaagtagcgaacgtttgtttaatctctccatttgtagtccgcttgatgttcgccttaccgccgaaatagtggggcgagtaaaacagtgcggcccacacgtacagttatcaattaagtcatacttaaatgatgatattgaacatcagttgcgctatcagaaaaccgactttgtgatcggttataccgaatttgaacggcctgaatttaaacgcacacttttatttaatgatgaattggtattggctgtttcaaaagatcatccgcgaataaacgaatctattacttcagagcaactttttgaagagcaacacgccgtggattctttggataaagtgggttcatttagcaagaactattatgaggctaatgacttgtcccatactatttcctatgaaagcacggatatgaatagcgttcttaacgttgtatctaaaacaaattacgtggctattgttcctcgctggttaattaatatatgtagtgaggaatctaagctaaaacttattgaattaccttgggcgaatactacacgagcctgttatctaacctggcatgaatctaccgatcgcgataaaggtcatcagtggatgaaagccttattaagccaatttagcctttcaatttaaactttattaacggctactggcggtgttactactggggtactatgtacctcagtagttttgttacgtagcggcactcattaaaattttatctccgttattctgtgtttattctcgcaatatttccctcagatgccagtctgccatttgggatagacctcaccaatttcactgaaatccgctgttaaatcagtttcacctcacattcttacgccgaaatttgtttgccatagggctaagagtgagtagactgcgcgaaaaaagtgaacacctgtaagccgaaactttggtcaaaggggagcttcatcctatgctttacgtattcactacatttttttatttcaaccctgggcagcatttctatgatagataaattgcagcaataccacttggtgcgtcgattgcatcagcaaattaaacatcgtgctgatcagacggccttccgccagtggtctcccgcagcagaaactcaacttagctggcagcaagtaggccatcaggttcaacgcatttctgctgcgctgctgtctaaaggtgtagcggtgcaggacaaagtgggtatttttgctaataacagcatggcgtggtctttagttgatttggctattttgcaaatccgtgcgatcagcgttccactttatgcgaccaatacgtcggcgcaggcggcctttgtcgtcaatgacgccgatatccgcattctgtttgtcggtgagcagtcgcagtatgatgtggcgataacgctgaaaagcctgtgtccgcagttggaaactatcgtagcgctggatccgacggttgatttacgtggctgcgagtatgctcagcaccttgcttcattcgacatcgctcccgatgaaacactgcagtttttgctgaatatgcgtatcgatagctgtgatttagacgatctgtttaccctaatttatacctcgggaaccaccggtgaacctaaaggggtgatgctggactaccgtaatatggcggcgcagctatatttgcatgatgagcgcttaacgctaactaccgatgatgtttccctgagtttcctgccgctttctcacgtttttgagcgcgcgtggagtttctacgtgatgcataccggcgcgcaaaatgtctacatcagtaatactgactgggttcgtcaggcaatgcaggccgttagcccaaccgtcatgtgtgccgttcctcgtttctatgaaaaggttttttcggcgattcatgagaaagtcgcgcaagccaaaccgcatcgccgggcgttgttccactgggcggtaagttgcggtgagaaacaattccgccgtcagcaggaagcacgcaaatcctcatggttttccgatcgtttgttcgctttggccgatcgcttagtgctgcaaaagttgcgtaatgtgctcggtggtcgcgtgcgatttttaccggcagccggtgcgcgcctagatgacaatatcattttgtttttccagtccattggaatcaatatcaaatatggctacggcatgacggaaacctgcgctacggtttcctgctgggaagaaaatgatttccgctttggttcaatcggcaagccgttgccgggtattgaagtgcgtctcggcgcggaaaatgaaattcaggttcgtgggccaatagtgatgcgtggctacctgaataagccgggagaaacggcggcgacctttactgaagacggctggttaaaaaccggcgatgcgggtgccattgatagcgcaggtaacctgtttatcaccgaacggttgaaagatttgatgaaaacatcggggggcaaatacattgctccgcagatgatcgaaggcaccttgggtcaggatcgttttatagagcaaattgccgtgatcgccgatacgcgcaaattcgtctctgcattgatcgtgccttgtttcgaatcattggaagaatatgccaaatcgatcaatttaaaatatcacgatcgtctggaactgctgcgtcatagccacattgtggaaatgtttgaacagcgtttgaaagatatgcagaaagagttgtcgaaatttgagcaggtaaagcgctttacgctgttgccaaaggctttctcaatggagtctggcgagttgacgccaacgcttaaactgcgtcgcaaaattatttctcaacgctatcagtttgagattgattctatgtatcgtgattaatatgctgacccattaatcggatgagcgatggttatctacaagccctgcgggcagcatctggaaaccaggtgtagcacgcggggcttggtgttttttgacgccagcttgctcttcccatcgttcttgtagcgcgaatcacggttttgctcaatattccggcaaaagtcattacctcatttagttctgttattgattcaccctccgacacaatcccgacaaaatgtacggtcttgctagtgttttatttttgtaaaattaatgaatacagcgtgtcacagattgaacctcctcttagcacctgatttgccgtttgcctgctagaaattctgacgttatgttaattaatcctattcgaaaaataaccagagttgggcctcgtgcctttcctacaggacgacgtagaaatgtttttctgttgtccaaaaaagtaaaactaagcccggaggcaaaaccatggagatgttgtcaggagccgagatggtggtccgatcgttaatcgatcagggcgtaaaacatgtattcggttatcccggcggggccgtacttgatatctacgatgccctgcacacggttgggggaatcgatcatattctggttcgtcatgaacaaggtgcagtacacatggccgatggctatgctcgtgccacgggcgaagtcggggttgtgctggtgacttccggccccggtgcgaccaatgccataaccgggattgctacagcctatatggattctattccaatggtggtgctgtcagggcaggtgcctagctcgctcattggctatgatgcttttcaggaatgcgacatggtcggtatttcccgtccagtggtaaaacacagttttctggttaagcgcaccgaagatattccttccgtgctgaaaaaagccttttatctggcctcaagtggacgccctggtccagtagtgattgatttgccgaaggatattgtcagcccggcgctgagactgccttatgcctatccagagcaagttagcctgcgttcatataatccaacggtacaaggccatcgcgggcagattaaacgcgcattgcaaaccattctggctgccagaaaacccattatgtacgtgggcggtggggcgataaacgccgcctgccacgaagaattgctcactctggcagagaaactgaatcttccggtgacgacgtcgttaatggggttaggtggtttcccagggacacatcgccaaagcgtaggcatgcttggaatgcacggtacttttgaagccaatatggcgatgcacaacgcggatttgatctttgccgtaggggtacgtttcgatgatcgtactacgaataatttggctaaatattgtccgaatgccactgttctgcatattgatatcgacccaacttctatttcgaaaacggtaaatgccgatattcctattgttggcgacgccaaacaggtgctgaagcaaatgctggagctggcgacacaaatcgactgtgcgcaggatttcgatgcgcttcgcgattggtggcagtctatcgaacaatggcgcgctcgtgattgcctgggttacaacaaagaaagcggcagtattaagcctcaggcggtaattgaaactctgcatcgtttgaccaaaggtgatgcttatgtgacttctgatgtcgggcagcaccagatgtttgctgcactgtactatccgtttgataaaccgcgccgttggatcaactctggcggtttgggaaccatgggctttggcctaccggcggcgctgggcgtcaagctggcgttaccggatgaaaccgtggtttgcgtaaccggtgacgggagtatccaaatgaatattcaggagttatcgacggcattgcagtataacctgccggtgttggtgctgaacctgaacaaccgttatctgggcatggtgaaacaatggcaggatatgatttactctggccgccattcgcaatcctatatggaatctctgcctgattttgtcaaactggctgaagcctacggacatatcgggatcgccattcgtaccccaggcgagctggaggcaaaactggccgaagcattaacgctgctttccgaaaccaatcgtctggtatttgtggatgtcaccgttgatgaaactgagcacgtttacccgatgcaaattcgcggtggcggtatggacgaaatgtggttaagcaaaacggagaggacctaatgatgcgccggattttatcagtattattggaaaacgaatcaggggcgttgtctcgggttgtcggcctattttcgcagcgcggatataacattgaaagcttgaccgtggcacctacagacgatccaactctgtcccgtatgaccatccaaaccgtgggtgacgaaaaagtactggagcagattgagaaacaactgcataagctggtggacgtattgagagtcagcgaactggtgcccggtgcgcacgttgagcgcgaaatcatgttggtgaaactacaggctagcggttacggacgtgaagaaatcaaacgttgcaccgagattttccgcggccagatcgttgacgttaccgcgacgctgtacaccgttcaattagcgggaaccagcgacaaactggacgcatttcttaatgcggtgcgggaagtggctgagattgttgaagttgctcgctccggcattgttggcgtttctcgcggtgaaaaaattatgcgttaagccgaaatcaggcatataaacgagataaatctgaggctctgctttgaagcagagctttttttttgcatttttaagcctgatagtgacatcctaaggtgaaagcggttgctcaatggagtgttctgcggttagatctatcatgggttatatccatagttaaattatgtatataaaacccggcagacagatctgcttttcataactttacagggtttataaggggttaacgtgaaactggatgaaatcgcgcgtctcgcgggtgtttcgcgcacaacggccagttatgtcattaatggcaaagcgaagcagtaccgggtcagcgataaaacagtagaaaaagtgatggctgtggtacgtgaacacaattatcaccctaatgccgtagcggcaggtttgcgcgcgggcagaacccgatccattggtctggtgattccggatcttgaaaataccagttatacacgtattgcgaattatcttgagcggcaggcgcgtcagcgcggctatcagctcttgatcgcctgttctgaagatcagcctgataacgagatgcgttgtattgagcatctgttacaacgtcaggttgatgcgattatcgtttcgacggcgctgccgccagaacatccgttttatcaacgctgggtagataaacccttacctatcattgcgttagatagagcgttggatcgcgagcactttattagcgttgtgggggccgatcaggacgatgccttgatgctggcgcgagagctacgcactttccctgcggaatccgttctgtatctcggtgctttaccggagctttcggtgagcttcctacgtgaacagggtttccgcgaggcctggcaggacgatccgcgtaaagtggattatctgtatgcaaatagctatgagcgggaagcttccggagtgaagtttgccgaatggctgaaaactcacccaatgccgcaggcgttgttcaccacttcctttcaattgctacaaggcgtgctggatgtcactttgcagcaaagtggccgcctgcccaccaatctggctatcgccacctttggtgataatgagctgttggattttctggaatgcccagtgttggcggtggcgcagcgtcaccgtgacgtggcggaaagagtattggaattggtgctggccagtctggatgaaccgcataaaccgaaaccgggcttgacgcgtattcgtcgtaatctgttccgtcgcggtagtttaagccgcaaataacgcgctgaatactttcgctaaaatgcaatcgggcaccttaatcggtgcccgaatcatatttgtcgctgttacttcaatgcttgtctcacacgtacccggctacgcggaacaggcggcggcaatattccagaaaatagccgtaggccacgcccataaccatagaaacgaccgcattactggctactgccgtgacgatctgctggaaatctgcaccgaccgtccacagaataatggcgtaaaccggagactgaaaactgacgtaggccagtaggtcggccagatttttcgcccaaaaatgttgtcccgcgcatcgttgagcgaaacggataaaactgtcccgatacatgccgtaaggccaagcaatcaggatgttaaccggtatggaaagcaagcgtgaagaaagcgactgctcaaaggtcatacctgaaatcagtatttcaatcgccataccggtgataaagcaatacaccacaagagcaaaggtatctgcaacggcgctacgtaagcgagaatcagtagaaaacatcgtcattacctcccagattgggggaaaatccgttaataggttaaatatgcacagctattattggtggtatgtttctattttttgttggtttatggggtattatttggtgttttgtttttactgtagtttacatgactgctttgtttaatataactagctgaaaatttctatttttaacatttgtctgatttttatacttccaactgacctgtaaagacttttttatggtgaattacgcggagggttgagtgtttattatttaaaaacaatgaattaagttcgctggtggttttaagcgtcaatggggaatttgattagcgcttaatagccatattgaaaggcgggaaaaatacattggcgctgcgctactaatttgggacttttcttaagatgcattctcttattaaaaagcggcgggtaatcagcggctaataatttatttcaaaatagattcatattcctctgagtaattgaagtaaaatgcgcccacggtgaacgcctggtaattttaatgggtattatttacgaagattatccgcaggaatgttctgcattaacattccccggcgcagccagtcactgcgggagataggcctaattcctaatattttgcattgtgcaatttttatactggaaatgagacatcccttgcagaaggaattaatgtgacaattaattgctaaattaatcgttatttaatcagtaaaatcatccggcggaaaaatagcccgtttatcatgacgttaatttccacgctacttgctgaaaacgccccttctacaagatatatctcaaaatacacccataaatattgccaaaccgcatctgctctggcttgacaaggttttcataccatccgtaaactctttaatgtggggatttgtgggataaagtggcaaataaggccatgaaggggtgactcaacgatgtttcgtggggcaacgatggttaacctcgacagcaaagggcggcttgccgtacctacccgttatcgggatttgctgaacgaggaatcgcgaggacagatggtctgcactatcgaccttcaccaaccatgcctgttgctttatcctttgcccgaatgggaaatcattgaacaaaaactttctcgtctgtcgagcatggttcctgccgagcgccgtattcagcgtttgctgttggggcatgctagcgaatgccagatggatggttccgggcgtttgttgattgcaaatacgctgcgtcaacacgccgggctgagtaaagaagtgatgctggttgggcagttcaacaagtttgaactgtgggatgaacagacctggtatcaacaagtcaaggatgacatagacgcacaacagtcgactcaggaacctttatctgagcggctacaggacttatcgctataagcatggtagataattataagcacacaagcgtgctgctggatgaggcagttaacggcctgaacattcgcagtaacggcatttatatcgacggaacttttggtcgtggtggccattcacgtctgattctgtctcaacttgggccggaagggcgtttgatagcaattgaccgcgacccgcaagctattgaagcagcgaaatccattaccgatccgcgtttctcaatcgtacacggtccgttttctgaattagcagattatgtgcgggaattggacttagtcgggaagatcgatggcgtactgttggacctgggcgtttcttcaccgcagttagacgatccagaacgcggtttttcctttatgcgtgacgggccgctggatatgcgcatggatccttcgcgtggcatttctgccgccgagtggttgatgaaagctggcgctgacgacattgcctgggtattgaaaacctttggtgaagagcgctttgccaaacgtctggctcgcgccattgttgagcgcaacctgacccagccgatgactcgcaccactgagctggctaatttgattgctaacgccagcccattccgcgaaaagcacaagcatccggccacccgcagtttccaggcgattcgcatttatatcaacagcgaactggaagaaatcgaacgagcattggaaggtgcgctggaagtattagctcccggtggtcgtctctccgtcatcagtttccattcccttgaagatcgtattgttaaaaactttatccgtaaccaaagccgtgggccgaaagtgcctgccggtctgccgttaacggaggagcagttacagagtctgggcggacgtaatttgaaatccgtagggaaaatgatgccttccgacgcggaagttgcggaaaacccacgggcgcgtagctccgtactgcgttttgcagagaggattaacgcgtgataggcaacgaacgccacggcttggtaggggtcattggcggagatttactccgtaatgccaagattccattgattctgctggttgcggtgttgatctctgcggtgttagtggtgacaaccgctcaccgcacccggttgctgaccgccgaacgtgagcagctggtgctggagcgtgatgctctggacatcgagtggcgtaacctgattctggaagagaacgccttgggcgatcacagccgggtcgagagtatcgctactgataagttaaaaatgcagcacgttgatccagcacaagaaaacattgtggttaaacaatgattaaatttgcactcaccatgactcggagtagccaaggtaacgcatgaaagcagcgcgccccggtaagttgaaacggcaggaagaacaagccagctttataagctggcgttttgcattgctgtgcggctgtattttactggctttggttgggctgatgctacgcactgcctacctgcaagtgatcaatccagacaaattggtacgggaaggcgacatgcgttcgctgcgggttcaatccgtacctaccgctcgcggcatgataagcgatcgagccgggcgacctctggcggtgagtgttccggtgaatgccatttgggccgatccgaaagaactgcaggaacgtggcggaattacgctggatacgcgctggaaagccctgtccgacgcgctggaaatccctctcgatcagttggcttcccgcattaacgcgaatccgaaaggtcgctttgtttatctggcgcgtcaggtcaatccggctattggtgactatatccataagttgaaattgccgggtatctatctgcgtcaggaatcccgccgctactaccctgcggggcaggttatggcgcatatcatcggcgtgaccaatatcgatggtcagggaattgaaggggttgagaaaagcttcgatcgctggctaaccggtcaaccgggcgaacgtacggtgcgtaaagaccgctatggtcgggtgatcgaagatatctcctctgtggatagtcaggcggcacataatctggcgctgagcgtcgatgaacgcctacaagcgctggtttatcgcgaattgaacaatgcggtggcgttcaacaaagctgaatcaggaaccgcagtgctggtggatgtgaacaccggcgaagtgctggcaatggccaacagcccttcttacaacccgaacaacctaaccggtacgccgaaagaagccatgcgtaaccgggcaattaccgatattttcgagccgggctctacggttaagcctatggtggtgatgaccgcattgcagcacggcgttatcaaagaaaacagcgtattgaatactctgccgtactttgttaacggccatcagatcaaagacgtggcgcgttatgcagagctgtcggtgacagggattctacagaagtcgagtaacgtcggtgtttctaagctggcgttagcgatgccatcctcagcgttagtagatacttactcacgttttgggtttgggaaagcgaccaatttggggttggtcggagaaagcagtggcttatatcctaaaaaacaacggtggtctgacatagagagggccaccttctcttacggctacgggctaatggtaacgccgttacagttagcgcgagtctatgcaacgatcggcagtatgggtatttatcgcccgttgtcgattaccaaagttgacccaccggttgccggtgagcgcgtcttccctgagcccattgttcgcaccgtggttcatatgatggaaagcgtagcgttaccgggcggcgggggcaccaaagctgcgattaaaggctatcgtattgcgattaaaaccggtactgcgaagaaagtcggaccggacggcaaatacgtgaaccgatatcttgcgtataccgccggcgtcgcgccggcaagcaaccctcgatttgctctggttgtggtcattgatgacccgcagggcgggaaatattacggcggtgcggtttctgctccggtatttggcgcaattatgggcggcgttttgcgtaccatgaacgttgaaccggacgcgttaccgaccagtgataaaagcgaattagtaattaataaaaaagagggttcaggtggcagatcgtaatttgcgcgacttactcgctccttgggggcttgacgtcccggggcgtgcgctacgggaaatgacattagacagccgcgtggcggctgccggggatctgtttgtcgccgttgtcggctaccagacggacgggcggcgctatattccgcaggctattgctcagggcgttgccgccgtgattgctgaagccgaaggcgtagcaccagatgccagcattacggaaatgcacggcgttcccgtgatttatctgagcaatctgaatcaacatttatccaaactggcaggccagttttaccaacagccgggcgcggcgttgcgcttaattggcgtcactggcaccaacggtaaaaccaccactacgcagctgttggcgcaatggactcaggcgttgggggagagcagtgcagtgatgggtaccgtgggtaacgggctgctgggacaggttgtgccgacagaaaataccaccggctcagcggttgatgtgcaacagattttgcattctctggttgaacagggcgctaaagtggccgcgatggaggtttcttctcacggactggtgcaaaaccgcgtggcagcgctgccgtttgccgccgccgtgtttaccaacctgagccgcgaccatctggattaccacggcgacatggcgagctatgaagcggctaaatggctgctgttctccactcatcaggccgaacacaaaattatcaatgctgacgatgacgtcgggcaacgctggctgagccagttgcctcaggcggttgccgtcagcatggaagataaagtgccgcagggctggaacggtccttggctgtctgccactcacgtggattatcacgataacggcgctacgatttcttttgactccagttggggtaaaggtcagttggaaagccgcctaatgggcgcatttaacgtcagtaacctgctggtggcgctgtcgaccttgttagcgctgggttatccattggcggagttgttaactgctgcacctaggctccagccggtttgtggtcgtatggaagtgtttaacgctccaggtaaacctacggtagtcgttgattacgctcatacaccggatgcgttggaaaaagctttggcggcggcccgcctgcactgcaaaggtcaactgtggtgcgtattcggctgcggcggcgatcgtgacaaaggtaagcgcccacttatgggagccattgcagaacagctggccgatcgcgttgtcgtgaccgacgataacccgcgtagcgaggagccgcaggctatcgtggctgatattcttcgcggtttgatggatgcgggccgtgcgctggcaattcatggccgcgccgaagcggtaaccagcgcgattatgcaggccaaagaagaagatgtggttttggtggccggtaaaggtcacgaagattaccaactggtaggcaaccgtcgtctggattattccgaccgtattaccgttgcccgtttgctggggggggtcgcatgattcccgtttccctgcaatacctcgcggagcagcttaatgctgagctggtcggtaacgacgatatgattaccgaagtgaccaccgatacgcgtcaggtgacggcaggttgcctgtttgtggcactgaaaggcgagcgttttgacgctcatgattttgctgaagcagccgttgccgcaggtgctggggcgttgttggtaagtcagcgcttattggtggatgttccgcagatcgtggtgaaagacacccgtctggctctggggcagtttgccgcttgggttcgtcagcaagtgcctgccagagtcgtcgcgttgaccggttcttccggtaaaacctcggttaaagagatgaccgcagcgattctgcgtcagtgtggcaacgtgttgtatacctccggtaactttaacaacgatatcggtgtgccgctgacattactgcgtttaacaccagaacatgattttgcggtgattgaactgggtgcgaaccatattggcgaaatcgcctacaccacggatttaagccgcccggaagccgcattggtgaacaatctggctgccgctcatctggaaggctttggttcactggcgggcgttgcgcaggcgaaaggtgaaatctttgccggtttgccagccaaaggtattgccattcttaacgctgacagtcatgactggccgcattggcagtccacgctggctcacaagcaggtttggcgtttttcaccgcaggccggtgaagacactgatttttatgccagcgatgtgcgcattcatcagcaaggtatggatttcactctgcattcgcctttcggcaatgtagccgtgtcgttgccgttaccgggtcgccataacatcgccaatgctttggctgccgcggccctcgcgatgtcggtcggtgcagatgtcgatgcggtgcgtcagggtttatctcagttgcaagcggtaaaagggcgtttattcccgatttcgctggccgaaggaaagctgctgctagatgacacttataacgccaacgtgggttccatgatcgccgcggcgcaggttctggccgatatgcccggttactgcgtaatggtggtgggtgatatggccgaattgggtgaaaccgcagaagattgtcaccgtcaggtgggtgaagctgcccgtctggctggagtggataaagtgttgagcgtggggaaattaagtcagctcatcagtcacgccagcggtaacggcgagcattttcaagataagagcgcgttgacggctcgtttggcggccctgttgtccgaacatcaagttatcaccgtattaattaaaggttcacgtagtgctgccatggaaagtgttgtgcaggcgttacaggagaaagcatcatgttagtgtggctggctgaatatctggtcaaattctattccggttttaacgttttttcctatttgacgtttcgcgccatcgtcagtctgttgaccgctctgtttatctccttgtggatggggccacgcctgattgcttatttgcagaagctgcaaatcggtcaggttgtacgtaacgatggcccggagtcacatttcagcaaacgcggcacgccaaccatgggcgggctgatgattctgttctccattaccatttcggtattaatgtgggcttatccgtctaacccttacgtctggtgcgtactgtttattctggtgggctacggaatcgtcggttttgtcgatgattaccgcaaagtggttcgcaaggataccaagggactgatcgcccgctggaagtacttctggcagtcggtgatcgcgctggccgccgcctttaccatgtacaccatcggtaaagacaccccggcaacgctcttggtggtgccgttctttaaagatgtgatgccccagttggggctgatgtacgttctactggcgtacttcgtgatcgtcgggaccagtaacgccgttaacctgaccgacggtttggacggtttggccattatgccaacggtatttgttgctgcgggcttcgcgttggtggcctgggcgacgggtaacgtcaactttgccaactatttgcacattccttatctgcgtcattccggtgaattggtgatcgtctgtaccgccatcgtcggcgccggattaggtttcttatggttcaacacctatccggcacaggtctttatgggcgatgtcggctcactggcgctgggcggcgcattaggcaccatcgccgtattgctgcgtcaggaattcttgttgctgattatgggcggggtattcgtggtggaaaccctgtcagtgattctacaggttggctcctttaagcttcgtggtcagcggattttccgtatggcaccgattcatcatcattatgagctgaagggttggcctgagccgcgcgtgattgtgcgcttctggattatttcgctgatgctggtcctgattggcctagcgacgctgaaggtgcggtaattatggtggattatcagggtaaaaaagttgtcattattgggctggggctaaccggcctctcctgcgttgatttctttatgacgcggggcgtttcgccgcgcgttatggatacccgcatcaatccaccgggtctggataagcttcctgccggtttggagcgacatttgggcgatctgaatcagcaatggctgttagacgccgatttaatcgttgccagcccaggtatggcgctggctaatccggcgttgagtgaggcggcggaagctggcgttgaaatcgtcggtgatattgaactgttttgccgtgaaaatcaggcgcagatcgttgcgattaccggctctaacggtaaaagcacggtcactacgctggtgggtgagatggcgaaagccgcaggctggcaggttggcgtcggtggcaatatcggcgttccggctctgaccttgctgaagcaggaaaatcagttggtggtgctggaattatccagcttccaactggaaaccacctcaagtctgcacgccaccgccgcgaccgtcttgaacgtgacggaagatcataccgatcgctatccgtttggtttgcaacaatatcgcgccgccaaactgcgtatttatgaaaatgccaaaacctgtgtggtaaacgccgatgatgcgctaaccatgccggtacgcggagccgatagccgctgcattagctttggcgttgatgtgggcgattaccatctgaataaacagcagggcgaagtctggctgcgggttcgcggcgagaaagtgctgaacacccgcgaaatgaagctgacaggccgacataactataccaatgcgttggcggcgctggctttggctgatgtggcggggatccctcgttcatcgagcttaaaagcactgaccacctacgcagggctggcacatcgcttccaattggtgtttgaaaacaacggggtgcgttggattaacgattccaaagccaccaacgttggcagcaccgaagcggcgctggacgggctatacgtcgatggcactctgcatttactgctgggtggcgacggtaaatccgctgatttttccggtctgacccgttttctacagggtgacaaagtccgagtctattgtttcggccgtgacggcgagcagttagcgcagttgagaccggaagtctctcagttgactgaaaccatggaacaggcaatgaaattgctggcacagacgctaaaaagcggcgatatggtgctgttatcacctgcctgcgccagtctggatcagttccgcagttttgaacaacggggcaccgaatttgcccgtctggcggaggaactgggctgatgcgtatgctggggctagggctgtttaataagttaaagcactgggtcatgggatcgcgggagagcgacgccaccagtatggtgctttatgacagaaccttgctgtggctgacctttggtttagccatcatcggttttgtgatggtgacttcggcatcaatgcctatcggtcagcgtttggcgggcgatcctttcctgttcgccaagcgtgacgcgctctacctcggtttggcctttggtttgtcgctggtcacgctacgtattccgatggaaatctggcagcgctacagcaacattatgctgctgctgtccatcgtgatgctgctaattgtattggtagtcggtagctcggttaacggtgcatcccgctggatttccatcggcccgttgcgtattcagccggcggaattatctaaactctcgctgttttgctatctggccagttatctggtgcgcaaggttgaagaagtacggagtaacttctggggcttctgcaaaccgatgggcgtgatggtaatactggcagtgctactgctggctcagccggatttgggcaccgtggtggtactgtttattactacgctggcgatgctgtttttagccggagccaaaatgtggcagttcctggcgattatcggctccgggatttttgcagtttgtctgctaatcattgccgagccttaccgtatgcgccgggttacttcgttttggaacccgtgggaagatccttttggcagcggttatcagctcactcagtctctgatggcgtttggccgcggggagttctgggggcaaggtttaggtaactcggtgcaaaaactcgagtatttgccggaagcacataccgactttattttcgcgattttaggggaggaactcggctatttcggtgtggttttagccctgttaatggtattcttcgtcgcttttcgcgcgatgtccattgggcgtcgtgcgttagagattaatcagcggttttccggctttttggcctgttcaatcggcgtttggtttagtttccaggcgttggttaacgttggggctgcggctgggatgttaccgaccaaaggtctgacactccccctgataagttacggtggttccagtctgttgattatgtcaacagccatagttttactgctgcgtattgattttgaaacgcgtttggcgaaagcccaggcgttcgtaaggagtgcccgatgagtgggaaaaccaagcgtttaatggtgatggcaggcggaaccggtggacatgtgttccccggtttggccgttgcgcatcatctgatggcgcagggctggcaggtgcgttggttaggcaccgccgatcgcatggaagccgatttggtccccaaacacggcattgagatcgattttattcagatttccggtttgcgtggcaaagggctgaaagctcaactgactgctccgttgcgcatctatcgtgccattcgtcaggcgcggaaaatcatgcgtgattaccagccagatgtggtgctgggaatgggcggctatgtttctggccccggcggtctggcggcgtggatgaacggtgttccggtagttttgcatgagcaaaatggtatcgcaggtttaaccaaccgttggctgtcgcgtattgccaaaacagtattgcaggctttccctggcgcatttcctcacgcagcagtggttggcaatccggttcgtacagacgtattggcattgccgctgccggctgaacgtttagccggtcgtgaaggggcgacgcgtgtgctggtgatcggggggagtcagggtgcgcgcgtgctgaatcaaaccatgccgcaggtggcggcggatctgggcgataaaatcaccttatggcatcaggtgggtaaaggtgcgttggctgaagtcgagcaggcttaccaacaggccggacagacgcagcacaaaatcgtcgagtttatcgatgatatggctgcggcctatagctgggctgacgtggtggtgtgccgttcaggcgcgttgacggtcagcgaagtggctgccgccggtttacccgcgatttttgtgcctttccaacataaagatcgtcagcagtactggaatgcgttgccgctggaaaaagccggtgccgccaaaattatcgagcagccgcagtttactgcttccgcggtgagcagcctgctacagcagtgggatcgaccgacgctgttagcaatggcggaacaggcacgagccgttgccattccggatgcgaccgagcgcgtggccgcggaagtgatcgctgctgcgaagccttgattcaaggcggaaataatgaacagttggcgtttaacgcgggctgtagagatgtaacaaactacatagtgaagaaaaacgtgaatacacaacaactggcgaaactacgtactatcgtgcccgagatgcgacgcgtccggcacattcactttgtcggcatcggtggtgctggcatgggtggtatcgctgaagtgttggcaaacgaaggctatcagattagcggttctgacctggcgccaaacccggtcactcagcagttaagcgcattgggcgcgcagatttatttccatcaccgtccggaaaatgtccgtgatgcgagcgtggtggtggtttcaacggcgatttctgcggataacccagaaatcgtggccgcgcgggaagcgcgtattccagtcattcgtcgcgctgaaatgctggcggaactgatgcgttatcgccacggcattgcggtagccggtactcacggtaaaaccaccacgacggcgatggtttccagcatttacgctgaggcggggttggatccaaccttcgtcaacggcggtttggtaaaagcggcaggcgttcacgcgcgtttgggctccagccgttacctgattgcagaagcggatgaaagcgatgcttccttcctgcatttgcagccgatggtggcgattgtgaccaatatcgaagccgaccatatggatacctatcagggtgactttgagaatttaaaacagacatttattaacttcctgcacaacctgccgttctatggtcgcgcagtgatgtgtgtggacgatcctgtggtgcgtgagttgctgccgcgcgttggtcgtcacattaccacttacggtttcagcgatgatgctgacgtacagattgccagctatcagcaaattggcccgcagggtcactttaccctgcgtcgtcaggataaacctttgctgacggtgaccctgaatgcgccgggtcgtcataacgcactgaacgccgccgccgcggttgcggtagcaacggaagaaggcattgacgacgaagcaattttacgtgcgctgagcggtttccagggcaccgggcgtcgtttcgatttcctcggtcatttcccgctggaaaatgtgaacggtaaaagcggtagcgtgatgctggtggacgattacggccatcacccaacggaagtggatgccactattaaagcggctcgtgcgggttggccggacaaacgtatcgtgatggttttccagccgcatcgttatacccgtactcgtgatttgtacgacgactttgccaacgtgttggaaggtgtggacgtgttgctgatgctggatgtgtattccgctggcgaaacgccaattcctggtgccgacagccgttctctgtgccgcaccattcgtaatcgcggccagttggatccaattttagtaacggatagcgacgcagttccgtcagtattagctaaagtattgaatgacaacgatctgatcctggttcaaggagcaggcaatatcggtaaaatcgcgcgcaatctggcagagaccaaattgcagcctcaggtgaaagaggaggaacatcatggttgataaagtcgccgtactgctgggtggaacctccgctgaacgcgaagtgtcattgatgtccggcgcggcggtattagccggtctgctggaaggcggtgttgatgcccatcccattgatactattgattttcctgtggctcagctcaaagagcatggcttcgataaagtctttatcgctctgcatggccgcggcggtgaagacggtacgctgcaagggctattggagtttctgcaactgccttataccggcagcggcgtcatggcctctgcgctgacgatggacaaattacgcagcaaattagtgtggcaggctttgggtttacgggtttcaccttttgtggcgctctctcgtcaacaatttgaaacactttcatctgatgacttcgctgagcggatcgctaagcttggcctgcctttaatcgtcaagccaagccgcgaaggctctagcgttggcatgagtaaggtggatcgcattgagaatctgccggtagcgttggaagaagcgttccgtcacgacaatgatgtactgattgaaaaatggctcagtggcccggaattcaccgtggcaatgttgggtgacgaagtgttgccttcgatccgcatccagcccgccggtgtgttttatgactatgaagccaagtatttatccgatgatacagaatacttttgcccaagcggtttaaacgcggaacaagagcaacagctggccgaactggctcgtcaggcctatcaggctctgggttgcagcggctggggtcgggtggatgttatgcaggatggcgatggcaaattctatctgttagaggtgaatacctctccgggtatgaccagccatagcctggtaccgatggccgcacgtcaggccgggatgagtttctcccagctggttacgcgcattctggcgctggctgactgatatgtcgcaagctgctctgaatgcacgggaacgtgccgccgaaacccgcgctgctcgccggagcaacggaggccagttagcggggttggttttcctgctgatggtgctgggaaccgtgctatggagcggctgggccgttgtaggttggatgaaggatgccagccgtttgccactgtcaaaactggtggtgaccggcgaacgccattacaccaccaatgacgatattcgccaggcgattctggctttgggcgcaccgggaacctttatgacgcaggatgttaacatcatccagcagcagattgaacggttaccctggattcagcaggctagcgtgcgtaagcagtggccggatgagctgaaaatccatttggtggagtatgtgccggttgcccgctggaacgatttacacatgattgatgccgcgggtaagtcgtttagcgtgccttcggaacgcatcggcggccagaaattgccgctgctgtatgggcctgaaggcagtgaacaggatgttctggagggctaccgggcgatgagtaaggtgttagcggccaataaatacacgctaaaaatggcggcaatgagtgctcgtcattcttggcaactggccttagataacgatgttcggctggagctggggcgggatgatcgcatgggacgtttgcagcgctttatggagctgtaccccatgctagagcagcagccagataaacgggttagctatatcgacctccgttatgacaccggcgctgcggtgggttggtccccggtatttatcgaccagcaggctagcagccagcagaacagtaatccgcaacagaatcaggcacaggcaaaacaacaatgatcaagtcgacggacagaaaactggtagtgggtctcgagatcggtacggcaaaggtctccgcattggtaggggaagttctgcccgatggcatggtcaacattattggggttggcagttgcccatcccgtggtatggataagggtggcgttaacgatcttgaatcggtagtgaaatgcgtccaacgtgcgatcgatcaagcagagttaatggcagattgccagatttcctccgtttatctggcattatcgggtaaacatataagctgtcagaatgaaatcgggatggttcctatttcagaagaggaagtaactcaggaagatgtagagaacgtagtgcataccgcgaagtcggtacgtgtgcgtgatgaacatcgaatcctgcacgttatccctcaggaatatgccattgattatcaggaaggtattaaaaatccggttggcctttccggtgtgcggatgcaggccaaagtacacctgattacctgccataacgatatggcgaagaatattgtcaaagcggttgaacgctgcggtctaaaagttgaccagcttatttttgccggtctggccgccagttatgcggtattgaccgaagacgaacgcgaactgggcgtttgtgtggtagatatcggcggcggtaccatggatatggcggtgtacaccggtggtgcactgcgtcacaccaaggtgattccttacgctggtaacgtagtcactagcgatattgcctacgcctttggcactccgccgaccgatgcggaagcgattaaagttcgacacggctgtgcgctcgggtcgattgtcagcaaggacgaaagtgtagaagtgccaagtgttggcggacgtcctccccgtagtctgcaaagacagacactggccgaggtcattgaaccacgctatacggaattgctgaacctggttaatgacgagattttacagttgcaggaacaattacgtcagcaaggcgtaaaacaccacttggcagcaggtattgtgcttacaggtggtgcggcacaaattgatggcctggccgcatgtgcgcaacgggtgtttcatgcccaggtacgtattggccaaccgctcaatattaccgggctgacggattatgcgcaggaaccttactactccactgctgttgggttattgcactacggtaaagaatctcatctcagtggtgagtcagaagtagaaaaacgtgcctcggtgggcaattggttcaaacgtatcaatagctggctgagaaaagagttttaatgtttcaacaaagagatcatgctgaacatattttttgatctcgaagcgacaggcacaaaacggagagaaactatgtttgaacctatggaactgaccaatgacgcggtgattaaagtcatcggcgtcggcggtggcggtggcaacgccgttgaacacatggtgcgtgagcgcatcgaaggtgttgaattcttcgccgttaatacagacgctcaggcgctacgtaaaacggcagttggccagactatccagatcggtagcggtattaccaaaggtctgggtgctggtgcgaacccggaagtgggtcgtaattctgcggaagaagatcgcgaagcgctgcgtgcagcactggatggcgcggatatggtcttcatcgcggcaggtatgggtggcggtaccggtactggtgctgcgcctgtagttgcggaagtagcaaaagaactgggtattctgacagtggccgtggttaccaagcctttcaactttgaaggcaagaaacgcatggcgttcgctgagcagggtatcgctgagttgtctaaacacgttgattcattgatcactattccgaacgacaagttgttaaaagttctgggtcgcggcatctctttactggatgcattcggcgcagctaacgacgtgttgaaaggtgccgttcagggtatcgccgaactgatcacccgtcctggcctgatgaacgtcgactttgctgacgtgcgcaccgtgatgtccgaaatgggttatgccatgatgggttccggcgtcgcttgtggtgaagatcgtgcggaggaagcggcagaaatggcgatttccagcccgttgctggaagatatcgacttatctggtgcccgtggcgttctggtcaacatcaccgctggtttcgacctgcgtttggatgagtttgaaaccgtaggtaacaccattcgtgccttcgcgtctgataatgctaccgtggttatcggtacctcattagacccggaaatgaacgacgagctgcgtgttactgtggttgcgactggtatcggcatggacaaacgtccggaaatcacgctggttaccaacaagcaaactcagccagtgatggatcaccgttatcagcagcacggtatgtcaccgttaccgcaggaagtgaagcctgcggcgaaagtggtgaacgaccaaactgctcaaacgaacaaagagccggattatttggatattccagcgttcttgcgcaagcaagctgattaatttccaaaaatttggtatctccgctctttgtgctaaactgtcccaccgatcttcctatatgctagatcggtaggatggataacattgcgagataaaacgatgatcaaacaaaggacattaaaacgtattgttcaagcgactggtgttggtttacataccggcaagaaagtcacgttgacaatgcgccccgcgccggccaataccggggtcatctatcgtcgcactgacttgaatccaccggttgatttcccggcagatgcaaaatccgtgcgtgataccatgctctgtacttgtctggtcaacgagcatgacgtgcgtatttctaccgttgaacatctcaacgctgctttggcggggttagggattgataacattattatagaagtaaatgcacctgaagtgccgatcatggacggcagtgccagtccattcgtgtacctgctgctggacgccggaattgaagagctgaattcagcgaagaaattcctgcgcctgaaagataccgttcgggttgaagacggtgataaatgggctgaactgtctccattcaatggattccgtttagatttcaccattgatttcaatcacccggcgatagataccagtacgcagcgttaccgcctggatttctctgctgattcatttgtgcagcaaatcagtcgtgcgcgtacttttggctttatgcgtgatatcgaatatctgcagtcccgcggtttgtgcctgggcggtagtttcgattgtgccatcgtggtagatgattaccgcgttctgaatgaagatggcctgcgcttcgaagatgagtttgttcgtcacaaaatgctggacgctatcggcgacctgttcatgtgcggccacaatattattggcgcgttcaccgcgtataaatctggtcacgcactgaataacaagttactgcaagccgtattggcaaaacaggaagcttgggaatatgtgacgttccaggacgaagccgaaatgccattggcattcaaagctccgtctacggtattggcttactaaagctacttatcacgtttggttgcgttggcactctctccggccaacgcagccagtcgttccaaaatagtcctcaatttctctgggctacggctcgccaatcctcgtaattcctttgcactttccaaactcaagtgacgtaatggcgctgactcttcgcttttttgcgcggcctgagcggtttcttgtattttgttctgccctttcgccattaacgcaggattaatcctgatgtcgattgaagacaatgatggtagaatttgcgctcgtagtgcagaaagcaggttagattgttcgtaacgtaaccgcattagccaactggcgttggcggtttctagcaccaaaatactctgtcgataattggccacacggcaccaaggctgcaactgtgacggaagcaatgcttttaccgcacgattgagctttaacagtgcgactgcgcgctgctgtacattgtgcagtgggcctttctccgttgcggtcgcatcgtcgaacagaacatctaataattgtgggcggctttcacgcattgacagggctccggcggattttaaacttgtgatcggtattctaaatcgttggcgacaatttggcagacgttatttctggccgcatctcctattggggatggtcgcggcgagtcttggcgtgccgtcaaacttgtccagcgggccagatcaaaccgcactgccgagtacatcttccagccaaagccgccaaaatcacggtgcgaccaactttaatagtctagctctgctgcaagagacgcatcgccgtccttccttcagcgtagactattggcagcagcatgcgcttcgcaccgtcattcgtcacctttcttttgctcttgcaccgcaggtcgcctatagccgcgtgcaggaagccgagacgctagaacaggtagagccgacgcaaattcaacagcttgcgctactggatacgcttaatgcgttgctaacccacgagtcgcggcctccgaccatcattcgctataccaaacgagcgcctcagcccgttttatcccttcatcaacccggcttatggcttgcgcaggtacaaggcattcgtgccggaccggttcgttacagctagttattcctctgaagtcttttaacttaatgtaacctttgaccgccggtttggtggtcttgtaagagatataaagaattatgctaatcaaattactcactaaagtttttggcagccgtaacgatcgaaccctgcgtcgtatgcgcaaagtggttgatgtgatcaaccgtatggaaccggacatggaaaaactgtccgatgaagaattaagagccaaaacggatgagttccgcgcacgattggcgaaaggcgaagtgttggaaaacctgattccagaagcttttgctgtggttcgcgaagccagtaaacgcgtattcggcatgcgtcacttcgatgtgcagctgttgggcggtatggttctgaacgagcgttgtattgcagaaatgcgtaccggcgaaggtaaaactttaaccgcaacgctgccagcttacctgaatgctctgactggccgcggcgtacacgtggttaccgtcaacgattatctggctcagcgcgatgcggaaaataaccgtccactgttcgaattcctcggcttaactatcggtattaacctgccgggtatgacagctccagcgaagcgtgaagcctatgccgctgatattacttacggtactaacaacgaatacggttttgactacctgcgcgacaacatggcgttcagcccggaagagcgtgtgcagcgcaaactgcactatgcgttggtggatgaggttgactccatcctgatcgatgaagcgcgtactccgttgattatttctggccctgcggaagacagttccgaaatgtatattcgggttaacaaactgattcctaaactgatccgtcaggaaaaagaagattccgataccttccagggtgaaggccacttctcggtagatgaaaagtcccgtcaggtgcatttaactgaacgtggcttgatcatgatcgagcagatgttagtggaagccggcattatggacgaaggtgaatctctgtactcaccggccaatattatgctgatgcaccacgtaaccgccgcgctgcgtgcccacgtactctttacccgcgacgttgactacatcgttaaagatggcgaagtcatcatcgttgatgaacacactggtcgaaccatgcaaggccgccgctggtctgacggcctgcatcaggccgttgaagccaaagaaggggtggaaatccagaacgaaaaccaaacgctggcttccattactttccagaactatttccgtatctacgaaaaactggccggtatgaccggtactgcggataccgaagcctttgaattcagctctatctataagctggataccattgtggttccaaccaaccgcccaatgatacgtaaagatctgccggatctggtctatatgactgaaatggaaaagattggcgccatcattgaggatatccgcgagcgtactgctaacggccagccagtgctggttggtacgatttccatcgagaaatccgaagtggtctctgctgaactgaccaaagccggcatcgaacataaagttctgaacgctaaattccacgccatggaagccgaaattgtgtctcaggcgggtcagccgggtgcggttaccatcgcgaccaacatggccggccgtggtaccgatattgtgttaggcggaagctggcagagtgaaatcgcacagttggaaaatccgactgaggagcaaattgccgaaattaaagccgcatggaaaattcgtcacgatgcggttctggcatccggcggtttacacatcatcggtactgaacgtcacgaatcccgtcgtattgataaccagctgcgcggtcgtgcgggtcgtcagggtgatgccggttcttcacgcttctacctgtcaatggaagatgcgttgatgcgtatttttgcctctgaccgtgtgtcaggcatgatgcgtaaactgggtatgaaaccgggcgaagccattgagcatccttgggtaaccaaagcgattgctaacgcacagcgtaaagtcgaaagtcgtaacttcgatattcgtaaacagctgctggaatacgatgatgtagccaacgatcagcgccgtgcaatctacagccagcgtaacgagttgctggacgtgtctgacgttagcgaaactatcaacagtattcgtgaagatgtgttcaaagttacgctggatagctacattccgccgcaatctttggaagaaatgtgggatgttgaggggctggaacagcgtctgaaaaacgacttcgatctggatatgccgattgcgcaatggctggaagatgaaccacagctgcatgaagaaaccctacgtgagcgtattcttcagcaggcaattgacgtttacaaacgcaaagaggaagttgtcggcgttgaaatgatgcgcagcttcgaaaaaggcgtgatgctgcaaacgctggattccctgtggaaagagcatctggcagcgatggattatctgcgtcagggtatccatttacgtggctatgcgcagaaagatcctaagcaggaatataagcgcgaatctttcgctatgtttgctgcgatgctggaatctctgaaatatgaagtgatcagcgtgctgagtaaagttcaggtacgtatgccggaagaggtcgaagcgctggaagttcaacgccgtgaagaagctgagcgtttggccagacagcaacagctgagccatgaaaatgacaatagcgccctgatgtctgaggaagaggtgaaagttgcagccagccttgaacgtaaagtgggccgtaacgatccttgcccttgtggttcaggtaagaaatataagcaatgtcatggccgtttgcagaaataaagctgcgattagccagcaatagttaaaacagtaaatagcggggcggccaaatagaccgcccttctttttgcttaatatcgcggaatcaggatgtgaacgtgagataaacgaggaatatcagaatgaaacatttgcagatcgccgtgggtatcatccgtaatgcgcaacgcgagatttttattacccagcgcgcggcagattcccatatggcgggtttctgggagtttcccggagggaaaatagaacagggtgaaacctcggaaatagctttgtatcgtgagctattggaagaggtcggtattgttgcgcaaaatgcggtgcagataaccactctggaacatcgttttcctgaccgaattgtcactctcagtttctatctggtagaacaatggcagggcgaaccttttggtcgggagggccagccggtgcgctgggttaagcaagaggagttacgggctgaggaattcccaaaggctaatctatcgatagttgagttactggtttctcaggcataatcacactcagattggagcacacaatgcgtggctccaatctgtgagcgcattagcgcggatcttcctcactccattcatcgctatctgagagttctccctgacttggaatacgcttctcttcatcggcccactcgccaaggtcgatcaactgacagcgtttgcagcaaaaaggacgatacgggctttgctcgccccaaataacgattttcccgcaggttgggcaattaacctgtatttcagttgaatccatattctctcctaaaacttgcttactgtatgacaacacagccataagcatcaataagtgcaaaagttaacaacaggccaactcaaagtttaagcgtgcgggtacagtgccattctcgctatccagcggtaggaaacgtatcgcgtagcgggttttgtggccggaaacctgcggataaagctgatgttccatggaaattcgcagtcgcaataaatcagcgccgtcggcattatcctggaagaatccatttaggctgatttggttgcgcaacgggccagactggcgaattaaatccagaatcatggttaatgattgattcagcggaattaacgtaccaagtaattcattggtatgctgattgcgttgttcctgcggcagatgcagccaaatatgtagcgtaggcagatcgaaactacaacaaccgcctggaatactgagccgttggcgaaccagactaatcatgcgatcttctttcagcgactgtccgatacgcggtgcggacatcagcactgatgcccggcttttcagctgagcgcgtaattcatcaatcaacgccatatcgacaccgggaacatcagcccaggcctgaagtttttgctgctgacgctcaagttctttgagtaaatcagtgcgaacttcccccctttcaagcacatcgatcagatcggatgcggtgcgaaaaaacgttaaggcgctggcgatattatccagatttcgctgactttctaactgttgcagcaaaaactcaatacgaagccaggtgcgcattttttcattcagcgggtgttcaaaaagtacagttgaggtgagatcactcatcggtgtaaatcctgttgggtcaccgtcgccaaccttaaataccggtgatgaagcgaggcaacgagcggtgggatcgtggaaggatcgccgctattgtcgataatgtcatccgcacaggccagacgctgttgccgcgtggcctgcgaagctaaaatatgttctgcctgctgacggctgataccgtctcttgccatggtgcgtctaagctgaatctcaggggtgacatccacgaccaatactcggttagctctatggctcaggttattctcaaccagtaaggggacaacccaaagtacataagccgcttttgcagctgcgagctgacgctgagtttcttgctgaatcagtggatgcaacagcgcattgagccagtttttttccatcgggtcgctaaaaatcttttcccgcagcttggctctattcaggctgccgtctgccagcaggatagaatatccataacgggctttaatctcatttaacgccggcattccaggctcaacaatctgtcgggcaatgatatccgcatcaaccagcggtacgccgagatcggcaaaagcattagcaacggtacttttcccactaccaattccgcctgtaagagcaacaatataggtcattacattgccttgcatactgccgttgaatacccgaattgtaactgaaagctgtgtgtaagacatagcgcggatgcattcggattttgaatctgtctttaatgcctattctctggccgagggagtattttttatatcaatattgctgatagttacgctgctcggaatagtgtaaccagacgaaccagtcaggaagggaaaatgcatggttttcaggtaatttgtgggagtgtagcctaaataaagttaaattcgcagtcttgccgaagaattattcctgcgtatgatagcttcactggaaatggcgtctattacgcccgatctcatcatgcgatccatcgccaataaccaggaaaccaaagccatgcgtattgaagaaggtttgaaattaggttttaaagatgtcttgattcgacctaaacgctccacgctgaaaagtcgctccgcagttgagttagagcgtcagtttaccttcaaacattcaggctataagtgggctggtgtacccattattgcagcgaatatggataccgtcggcaccttccgcatggctgaggttctctcctcatttgatgttcttaccgcagtacataaacactattccgttgaacaatgggccgattttgttcgacgtgtgcctgaatcggtactgcgccacgtcatggtttctaccggtacatctcaggcagattttgccaaaatgaagcaaattctggcgctttctcctgcgctgaaatttatctgtattgatgtagccaatggttactctgagcactttgttgctttcctgcaacaggctcgcgaagcttgccctgacaaagtgatttgcgcaggtaatgtagtcacaggcgaaatggttgaagaactgattctgtctggcgccgatattgtaaaagtagggattggcccaggttcggtttgtacaacccgagtgaaaactggcgtgggttatccgcagctttctgccgtgatcgaatgtgctgatgctgctcacggtttaggtgggcaaatcgtgagtgacggtggttgttccgttcctggcgacgttgccaaagcgttcggtggcggcgcagactttgttatgttgggcggtatgttagccggtcacgacgaatgcgaaggtaaagtggttgaagaaaacggtgagaaattcatgctgttctacggtatgagctctgagtcagcgatgaaacgtcacgttggcggcgtagcagaatatcgtgccgccgaaggtaaaaccgtgaagctgccattgcgtggctcagtggataataccgttcgcgatatcatgggcgggctgcgctctgcttgtacttatgtcggtgcttctcatttgaaagagctgaccaaacgcaccacctttatccgcgttgctgagcaagaaaaccgcgtatttggcagtaactgagctaaataaacttaatcggtttacgctgaacgagtgttttatatcgctgatagtgtgtgattaattgattattaaagaagggacgcaaaatgatgcgtccttttttaatctactgccaaacccaaacccaaacccaaacccaaacccaaacccaaacccaaacccaaacccaaacccaaacccaaacccaaacccaaacccaaacccaaacccaaacccaaacccaaacccaaacccaaacctggaacttttgttaactaataattcccccaagttggaaaatggggaggtacatagcaataaccagtgtgccaatcactgcgccgacgaacagcatcaacattggctcaagcatttgtgtcaacttatcagccagttcctcagtttgctgctgttgccaaccagcaagctttgtcagcacgttatccagtgagccagattcttccccaatgcgtactaactgttggcaaagtggagggaaaagaggttggtgtgaaagggcatcactcagaggtattccttgattaattagctgataaaaatgattgataatggatttgtaatgcagattatcaatggaagtagcggctgcttccagcccattagctaaggttaaacctgctttctgtgtgacagataaagtgcgaaaaatttggctgagacagtaccctttaaccagtggtgctatcagcgggagatgtaacagcaagaattgctctcgttgtttccaccgtgcgcttacccttattttagagatgtaaaccaatacaataccaatgattgccacgatagagtaaataccgtaattacccagtattccggatagatatagcagcccttgagtcagagcgggcagtggggcgtcaaaagtctgatagagccgcccgaattctggtaaaacaacaagtaacatcagggcactgacggcgaaagcaaccagacaaacaaaggcggggtatctgagtgtcttagccacttttttttgcaggtactggcgtttttcctgttgctcggctagctggagacagcatttatctatctcacctgttagttcgcctatggcaattaattgcgcgtatatggctgggaaaacggatggataggcgtttatagcctcagatagcgcctgcccttgagacaggctttcacttacatctcttagtaaacagcgccatattggcgtctcggcctctgctgccaacaattgcagactatttattaacggcagtccggcttgcagaagcgtagctaattggcgtgtgaaattaagcagatgcttcccttgatgtagccgagagcttaggcgttttatcattctgatacggataggctgcagcccctgctgtattactctttggtaaatcaccgatttttcgctagctagagactcgccgacgatcacctttccttcgctatctatgccttgccagataaataaaccgagtgtcattgcattccccttaatggcgtcagatttccgacaactcgtgagatttcggcgatactggttattccctgtttaaccaacgctaagcctgcgatgagtagtgaatggggctcagggggcggctgagaatttttcaggccaggaacaggggctgcactcattaaatcctgctgatttgacggtgtcattgcccatgtgtcatagatacctattcggccatagtaaccgctactacaatgttcgcaaccagtggcataccagtgatgtaaaggctttgggcacaaaattgtgggcagaatgactggctcgggtgctgcgcgtttacaacgttgacatagacggcgtaccaggcgttgggctatcaccagttttaggcaagatgcgagcagataatgactgattcccatttgagttaatcgggctagcgtttcatgcgttgaattggtgtgcaaggtcgaaagcactaaatggcctgttagtgcagcccttaccgcaatatcggcggtttcattatctctgatctcgccgatcataatgacatccgggtcctgcctgagtaatgcacgtaacgcctgagaaaagtctaaatctattttactgttggtctgggtttgattaatgccttcaacgggaatttcgatcggatcttcgacactgcataaattacggtactgctgatttaggtgttgtagacagctatacaaggtcactgtttttccgcttccggttggcccggtaaccaaaatcaatccttgcggtaaacttaaggcctcaaggattgattcccgactttttgggggaagatccagctcgtccaatcgttgcggtatattggtattcagaatgcgtagtaccactttttcgccgtattgagttggtaatgtggcaatgcgcagtgagtagtaatgattatcaaggctaaggctaaactgtccatcttgaggtaagcgccgttccgcactattcagcttagccattactttgagacaggcattgattctattaaccaaattagccggtggggatagcgtttggtgcaaaatgccatcaatacgtaaccgaatacggtaatagcggcgataaggctcgaagtgaacatcagacgcacgtttttgaatcgccatgcgtagcgtttgatgaatgatgttgataatgggcgcatcactttcatcattaagtgaagtcacttccttattatcaaaagcttgagtacgtgatttgtccgtatcagggaggtattttatggccgcttcttccgcgtgttttttactctcgatatctggcttaatcgagccgtttaactgctggattaaatcaggactcaaatgatgaaggtggtgctcaatttttgccgcaggccatagagtcacttccacatttaaaccgcaggcaaagcgtaatgcatttatctcctcactggttgggtactgcaacatggcaagagttaatgtatttgggctgatttccaacggtatcgctcgatactgctggcaaagccgggataacgcatccccggctcctttgttattgattgagcggttgctattcatcgtcgctagacgtctctttaagagcaaataccgacttgcagagtttacttagttcgtcatgatttcctgtacatgcgcgtgtccaggcaaggttaccggcggcgcttttagttggggttaatacaacgcttaatccatccagagtctcctgcccggtcatagagatgaccccttttgcaatgttaatggctttgacataacgagtaggttggccagagggaataccctgactaccagcattgcagcctaataatgccgagtgttccatcgagcaaacctctacggccatgcggtaaggagcactggtttgcaacatatcggttagggccgctttctgtatatagctttgataagcaggaataccgatgccgccgagaatggcaatgatgacgatagaaaccatgagttcaatgagggtaaaaccctgtgagtaatacattttcacactccttgtgatgaaagacgaggtaagggtgcggttttttttatcgcagggaaagtgggtttgaataggactgcgaaacggattgtgagaattttttagtgttgcagtaatcagcggttttttttcggcagaggccgcaaaaaagagctcattgttacctgagctcttttcctggctgaaacaaatctgttagcgttattgaaaacgcatcgagaggtctaaggcggtaacgtgtttagtcagtgcgccgacagaaataaaatcgattcctgtttcggcatagctacgaagtgtctcgagtgtgacattacctgagacctccaactgagcgcgacctgcgttgagggatacggcatcacgcatcataggaatggtgaagttatcaagcatcacgatatcggctccggcatccagagcctgctttaattcatctaaagattccacttcgacttcaattgggacatcggggtggatccaaaatgctttactcacggcttctttaatcgaaccggcggcaataatgtggttttctttaattaaaaaggcatcagtcaacccaagacgatgattgctgccacctccgcataacactgcgtattttaatgcggttcgtaagccaggtagtgttttacgagtatccaggagttgggtatgcaacccttggagtaaagcaacatagcggctgacttcggtggctacgccggatagcgtctgtacaaaatttaatgcggtacgttcgccagtgagcaagatgcgagcagggccggaaaggtggcacaacgtttggttggcggtgagcgcgtcaccgtctgccaccagccactcgacttcaactttaccgccgagctggataaagacttcgttcagccagcgttgcccgcagaaaacgccggcttcgcgagtgataatagtcgcggaggcttgtttatctgcggggagcagttgggccgtcaggtcgcgatcggcattgacctcaccgcctagatcttcactcagtgccaaggcaactgaaaagggaatatcgctttgaattcgctctaataacgcggtgcggcgactgtcggcactgtagctacgtgtcggcatagaaaactccgaaatggcggatagataatagttcaaacatgctactctgttgctggcgtcagtgctactacagagccgttttagaatgagggttgaggtgacaaatgcagttagagaatggctggattgttggggttaagcgggtggtttctcctcattttgatctcagacctgaagatgaggctccctctcttttggtcattcataatatcagtttgccgccgggtgaatttggtggaccttatatcgaccatctgtttaccggaactttgaatgcggatgaacatccttattttgctgatattgtgcacttgcgagtatcggcgcattgcctgattcgtcgcgatggtgaaattatccaatacgtgccttttgataagcgagcctggcatgccggtgtatctcaatttgacgggcgtgagcggtgtaacgatttttccattggtatcgagttggagggaacggatgtgctaccgtttaccgatgcgcaatatcaaagtctgaaaaaaatcagtgcgttgttgctatcccattatcccattaccctagagcggataaccgggcatagtgatatagctcccggccgaaaaaccgatccggggccagcatttgactgggcgctttatcgacaaagtttgactccattattggagtgattttgcagcaatagaggtcatgatagcggaggcgaggattccgtcatttttaccttttttgtgataaccgctgccgggaggcatggtgcctgaaggttcgggctggtggaatgtagagggagacagggaatcaatgacgctttttacgctattgctggtactggcctgggaacgtttgttcaaattaggcgaacattggcagctggaccaccggttggacactatttttagtcggttgcatcgatactcgttgctgcaaacgctcggtctggccattttgtgtatggccattgtcggtttgatgttgcagttggttcaggactatctgttcggcttgccgcggctgttactgtggattgttatctgcctgttgtgcatcggcgctggtggtataagaaaacactatcgtgcttatctgaaggccgctcgacaaggggatgccaatgccagtctgcaaatggcggaagagctggcattaatccatggattgcctgcggactgtggcgaaaaggaccgactacaagagttacagaatgcgttgttatggattaatttccgctactatctggctcccttgttctggctggtggtttgtggtttttatggcccggtagctattacgggctacgcgatgttacgcggataccaaacctggctggcgcgtcaccgaaaccctttgcagcgctctcagtcaggcattgaccgtgttttacactggattgactgggttcccgtccggttggttggcgtggcatacgcactgcttggtcacggcgagcgtgctttgccagcgtggtttgcctctttgggggacttgcattccccgcagtatcaggtgctcacccgtttagctcagtattctctggctagagaaccgcatcttgacccagtacaaacgccacgcgcggcggtatctttggcgcggaaagtcacgttgacgattataattgtcgtagctttgctcacgatctatggtgcactggtatagcgggcattagaggcattctcgataaaaatgactgctatctgacaaggtagctttgtaaataaaacatcggattggcagcaagagcccatcaaaataagtgtatgtcggcttcgttggttttgtaacaggaaacaatgaaatactgagaattcaacgagtttattacggagtttagagtgtattagcgctagctttcagttattaatggggagtattaagtgaacaaggcaagcgaaatacaggcagggaattgtcggattgaggcggttgagcctgatggttttttgctcctgatttcccctacacattagttcgctttcggcttgggtaataccagacactcatggccgtggaatgggtaaagatgtcaccgcagcgggagttttaagctcctttataatacggtgatttccgcggtaattggctgattttctctggtgttgcgagagaggttaggcgtaatttctcatgtgaaaacaatcgttaatcgttaatcgttaatcgttaatcgttaatcgttaatcgctaatcgctaatcgctaatcgctaatcgctaatcactaatcactaatcactaatcactaagcaaatgactttcgatgaagctcagtaagcggctttattgctctatgagcaattaaaaaacaggcccacagtatgaatgcgggcctgaaggttggtgcttatcgctataaatcagatgccgcaaagcgacgagcgattaagatttattctgcttaactcggtttttcagcatataaccaaccgctagcacgacgacccagacggggataagcaagacggaaatctgaatgcccggtgtcaggtacatgataaccaaaatgcccgccaggaaagtgaggcataggtagttgctgaagggataccagaaggctttaaacttaggctcaattccttggcggtttttcgctgcacggaattttaagtgagcaaggctaatcattgcccagttgatcaccagcgctgaaaccactaacgccatcagtaattcaaatgcccgtccgggaatcagatagttaatcaatacgcagaatgcagtcgcaaaggctgaaacagcaatagcaatgaccggtacgccgcgaccatctacttttaataaagcttttggaccgttcccttgcttggctagaccaaacagcatgcggctgttgcagtaaacgcagctgttgtacaccgacaacgcggcggtaagcactacgatattcagcacagtagcgacaatattactgtccaaagcatggaaaattagtacgaagggactgccgccctcaaccacttttccccaaggataaagtgagagcaatactgcaagtgaaccgatataaaacagtaagatacgatagataacctgattggttgccttagggatgctgcgcgcgggatcttctgcttctgccgcagtgatgccgaccagttcaaggccgccgaaggagaacataatcaccgccatcgccatgactaacccaatgaaaccattagggaagaagccaccctgagcccacaggttggtgaccgtcgcttctgggccaccctgtccgctcaacaacaaatagccaccgaatacaatcatcccgatgatagctaccactttaatgatggcaaaccagaattccatttcgccatacactttaacgttagccaaattgatagcgttgatagcgaggaagaatactgcggcggaaacccaggtcgggatttccggccaccagtattggacgtaaatccccacggcggtcagttcggccatcgcgaccaaaacgtaaagtacccaataattccagccagaggcgaaaccggcgaagttgccccaatatttataggcaaaatggctaaatgaacctgcgaccggttcttcaacgaccatttcacccagttggcgcatgatcagaaaagcgataaagccgccgatggcgtatcccagcagcactgaagggcctgccatttttatggtttgtgcaataccgagaaaaagccctgtgccaattgcgccgcccaaggcgattagctggatatggcggttttttagaccccgctttagctccgcgccttcttgttgaacactcatcgttgcatcctctgtctttgtggctaatgcctaaatcgctatttgtggtgttgtgtaatcttgaaatgccgttgtctgtattgttttatttacgggtgttcattttgataatggtgccaatgactacccattacgtgagaatagtggtatgcgagaattattgcatctgctttttcaatggatcactcgtattttatgcatttaagaaatgctaaggccggtgactattcagggggcttcagaaatggcgagggagaaacggcggttttatagacattcttcggtgaaatgagaatttataaaatggtcaaaccagttttcaggggctcatattctcggtaataaaataaagagtgttatcggcgaatttaaattcatttttattgatttaataatcacaaatgcctcaactataacgcttcagcttgcctaattatccttttcataatcgttacaatttttcgggggtgagtaatggtattaccacctataggttaccactttgcggcataacattagtgaagttgttaaaatgtgctggctttcatgatttcggtcaatgtccgtatggacagctagtgaatactttgttactttatcgtcacgtttttgaaattggtattaccaattgactcagcgccattcgcagagacgaattcactcaatacggcttacagcgcgactcacataaattatggcctacaacaaaatacgccaacccaaattatcagatgttatcgagcagcagcttgagtacctgatcttggaagggacactacgtccgggcgagaaattaccgcctgagcgcgagctggcgaagcaatttgatgtttcccgaccttccttgagagaagccattcagcgactcgaggccaaaggccttctgctgcgtcgccagggaggcggtactttcgtccagacgaacctgtggcaaagctttagtgacccgctggcagaattgctggccgaccatcctgaatcacaattcgatttgctggaaacacgtcatgccctcgaaggtattgccgcgtattacgcggctttacgcggtacagatgaagatctgcaatgtattcgtgaatgtcatactgcgattcaacaggcgcaagacagcggtgatttagacgctgaagctgatgcggttatgcagtatcaggtggctgttacagaagcggctcataatgtggtgttgttacatttactgcgttgcatgggcccgatgttagaacagaatgttaaacagaacttcgaattgctttactcgcgccgcgaaatgttggcaacggtaagcagtcaccgcgccgggatattcgaggcgattgtggcccgcgagccggaaaaagcgcgcgaagcctcacaccgccacttggcgtttattgaggaaatcttgctggatcttagtcgtgagaacagtcgccgtgagcgatcgctccgacgcctccagcaacgcaaggattaagggcttctcccagtcgggatgggttctaagtgcttattttgagcactaaaagcggcaactaaactgatgagcctatcttccggtgctttcaccagggcgcgtgttttaacctggtttaatcactctggttaaaacacaggaagataggctccaaataaaccattagagacagataaggaataccaccatgtcagaacgtttaattaatgacgtggatccgatcgaaacccgtgactggctacaggcgattgaatcggttatccgtgaagaaggtgttgagcgcgctcagtatctgattgatcaggttttgggcgaagcccgtaaaggcggcgtaagcgtggctgctggttctgagaaccgcaactatgttaactccatcgcagtagaagacgaaccagcctaccctggcaacctggatctggagcgtcgtattcgctctgcaatccgttggaacgccgtgatgaccgtgctgcgcgcgtctaaaaaagatctggatctgggcggccacatggcttccttccagtcttctgcaaccttctacgaagtttgcttcaaccacttcttccgtgcgcgtaaccaaaaagacggcggcgatctggtttacttccaggggcatatctccccaggcgtttacgctcgtgccttcctggaaggtcgactgacccaagaacagatggacaacttccgtcaagaagttcacggcaaaggtctgtcttcttacccgcatcctaaactgatgcctgaattctggcagttcccgaccgtttctatgggtctgggtccaattagcgccatttatcaagctaagttcctgaaatacctgtctcaccgtggtttgaaagatacctcagcacaaaccgtttacgccttcctgggtgatggcgagatggatgagccggaatccaaaggtgcgatcaccatcgctacccgtgagaaactggacaacctggtcttcgttatcaactgtaacttgcagcgccttgatggcccagttaccggtaacggcaaaatcatcaacgaactggaaggcatctttagcggtgctggctggcaggtactgaaagttatctggggcggtcgttgggatgagctgctgcgtaaagataccagcggtaaactgattcagctgatgaacgaaacgctggatggcgactaccagaccttcaaatccaaagacggcgcttatgtccgtgaacacttcttcggtcgtttcccagaaactgctgcattagtgaaagacatgaccgatgacgaaatctgggcgctgaaccgtggcggccacgatccgaagaaagtctttgcagcactgaaaaaagcgcaagataccaaaggcaaaccaactgtaatcctggctcataccattaaaggttacggcatgggtgaaacggctgaaggcaagaacatcgctcaccaggtgaagaaaatgaacatggacggtgttcgtcacttccgtgatcgtttcaatgtgccagttgctgattcagaaatcgaaaaactgccatacatcaccttcgagaaagattccgaagagtacaagtatctgcacgaacgtcgtcaggcgctggaaggctacgtgccaagccgtctgcctaacttcacccagaaactggaaatgccagctctggaagatttcagctccttgctggaagagcagaacaaagaaatctctaccactatcgctttcgttcgtgccttgaacgtgatgctgaagaacaaatcgatcaaagatcgtatcgttcctatcatcgctgatgaagcgcgtacattcggtatggaaggtctgttccgtcagatcggtatttacagccctaacggtcagcagtacaccccgcaagaccgcgagcaggttgcatactacaaagaagacgagaaaggtcagatcctgcaagaaggtatcaacgaactgggcgccgcttcttcatggttggccgcagcgacttcttacagcaccaacgatctgccaatgattccgttctacatctactactccatgttcggtttccaacgtattggcgatctgtgctgggcagcgggtgaccaacaggcgcgtggcttcctgatcggcggtacttcaggtcgtacgactctgaacggtgaaggtttacagcacgaagatggccacagccatattcagtcactgactatccctaactgtatttcttacgatccggcttatgcttatgaagtagccgttatcatgcatgacggcctggtacgtatgtacggcgacgctcaggaaaatgtttactactacctgactacgctgaacgaaaactaccatatgccagctatgccacagggcgcagaagaaggtatccgtaaaggtatctacaaactggaaactctggccggcgagaaaggcaaggttcagttgatgggttcaggcgctatcctgcgtcacgttcgcgaagctgcacagattctgtctgaacagtatggcgttggttctgatgtgtacagcgttacttccttcaccgaactggctcgtgatggtcaggactgtgagcgttggaacatgctgcacccaaccgaaactccacgcgtaccttacgtagctcaggtaatgaacgaagcgccagcggttgcttctactgactacatgaagctgttcgctgaacagattcgtaactttattcctgccagcgagttccgcgtactgggtacagatggtttcggccgttctgacagccgcgagaacctgcgtcaccacttcgaagttgattcttcttatgttgtggttgcagcactgggtgaattggctaaacgcggtgacatcgacaccagcgtagttgcagaagcaattactaagtttggtatcgacgccgataaagttaacccgcgtctggcataagaggtaaagaacaaatgtctatcgaaatcaatgtaccagacatcggtgcagatgaagttgaagtcaccgaaattatggtgaaagtcggcgataccgttgaagttgaacagtcgctgattgctgtagaaggtgataaagcctctatggaagttccctcacctcaagcgggtgtggtgaaagaaatcaaagttgcggttggcgataaagtcgaaactggcaaactgatcatggtcttcgaatccgctacaggtgcctcagcggcacctgccaaggcagaagagcaagcggctgctccagccccagctgctgcacctgcggctagcgcagcgaaagacgttgcggtaccggatatcggttctgacgaagttgaagtcaccgagatcatggttaaggttggcgacagcgttgaagctgaacagtctctgattaccgtagaaggcgacaaagcctctatggaagttccggctccgttcgctggcatcgtgaaagaaatcaaaatcaacaccggcgataaagtgagcaccggttctatgattatggtcttcgaagttgcaggtgctgcggcaccggcagcagcggcgcctgctcctgcagccgctcctgcagccgctccggctgcgccatcggcttcagcggcgaaaaacgttgaagtgcctgacatcggcggtgacgaagttgaagtgaccgaagtgatggtgaaagtgggcgataaagttgccgctgaacaatccttgatcaccgttgaaggcgacaaagcttccatggaagttccagctccatttgctggcaccgtgaaagaaatcaaaatcagcaccggcgataaagtgagcaccggttctatgattatggtcttcgaagttgaaggcgcagctcctgcggcagctccggctccacaagcagcggcacctgcggcagcggctccggccaaagcggcagcgccagcagccaaagcggaaagcaaaggtgaattcgcggagaatgcagcttacgttcacgctactccggtcgtgcgtcgtttggctcgtgaattcggcgttaacctggcgaaagtgaaaggaactggccgtaaaggtcgtatcctgcgcgaagacgttcaggcatacgtgaaagatgcagtgaaacgtgctgaagctgctccggcagcagcggctggcggcggtctaccaggcatgctgccttggccgaaagttgacttcagcaagttcggtgaaatcgaagaagtggaattaggtcgtatccagaaaatctctggtgctaacctgagccgcaactgggtcatgattcctcatgttactcagttcgacgaagcggatatcactgacgttgaagcattccgtaagcaacaaaacgttgaagctgagaagaagaaacaggatctgaagatcaccccgctggtgttcctgatgaaagccgctgctaaagcattggaagagttcccacgctttaacagctctatttctgaagacggtcagaaactgacgctgaagaaatacatcaacattggtgtggctgttgatacgccaaacggtctggttgttccggtcttccgtgatgttaacaagaagggcatcgttgagttgtctcgcgagctgtctgttatctctaagaaagcacgtgacggcaaactgaccgcatccgatatgcagggcggctgcttcaccatctccagcctgggcggcatcggcggtacggcgtttacgcctatcgtcaacgcaccagaagtggctatcctgggtgtgtctaaatcatccatgaaacctgtttggaatggtaaagagttcgcaccgcgtctgatgttgcctctgtctctctccttcgatcaccgcgtgattgatggggcggcaggtgctcgcttcgcagcttacattgccaccattatggctgatattcgccgtctggttatgtaatagcttaggccggcctagcgccggccttattattacttagcttatggttatatcactgatagttatgaaccgaccttgtttcgctcgttacattagtagacaaggttgttgagacactcgtcacgcgatgcggcttttcagtctattaacaattctgtaaactgctcgcagtgtaagcgtcccggtggatgaagggcgttatgaactttattagcctaataaatgacgtctgacccgccggacaaacaattaagaggtcatgatgagtactgaaattaaaactcaggtcgtggtacttggggcgggcccagcaggatattctgctgcttttcgttgtgcggacttaggtctggaaactattctggttgagcgttactccactctgggtggtgtttgcttgaacgtgggttgtatcccgtcaaaagcattgctgcatgttgcaaaagtgatcgaagaagccaaggcgctggctgagcacggcattgtttttggcgagcctaagactgacattgataaagttcgtgtctggaaagataaagttatcaatcagttgaccggtggtttggcaggtatggctaaaggccgtaaagtcaaagtagttaacggtttcggtaaatttaccggtgcgaatactttggtcgttgaaggtgaaaatggtccaaccaccatcacctttgataatgccattatcgctgcgggttctcgtccgatccaactgccattcattcctcatgaagatccacgcgtgtgggattcaacggatgcactggcactgaaatctgtcccagaacgtctgttggtcatgggcggtggcatcatcggtctggaaatgggtaccgtttaccatgctctgggttcgaaaattgatgtggtagaaatgttcgatcaggtgattccagcggctgataaagacgtagtgaaagtattcacaaagcgtatcagcaagcagttcaacctgatgctggaaactaaagttacagcagtagaagccaaagaagacggtatctatgtaacgatggaaggcaaaaaagcgccagcagaaccacagcgttacgatgcagttctggttgcgattggccgtgtacctaacggtaaactgctggatgcgggtcaggctggtgtagaagttgacgagcgtggtttcatcaacgtcgacaaacagctacgtacgaatgtaccgcacatctttgcaatcggtgacatcgtgggtcagccaatgctggcacataaaggtgttcatgaaggccacgttgccgctgaagttatcgccggtatgaagcactacttcgatccgaaagtgattccatccattgcgtacactgaaccagaagtcgcatgggttggtttgaccgagaaagaagcgaaagagaaaggcatcagctacgaaacctccaccttcccgtgggcggcatctggccgtgctatcgcttcagattgcgcagacggtatgaccaaactgatcttcgacaaagaaactcaccgtatcatcggtggtgctattgtcggtaccaacggtggggaactgttgggggaaatcggtctggcaattgagatgggttgtgatgcagaagatctggcattgactatccatgctcacccgacgttgcacgaatccgttggtttggctgctgagatttacgaaggtagcattaccgacctgcctaaccctaaagcgaaaaagaaataatttctgattgctgatgtgttagttaaagcggctcctgattcaggggccgttttttattgggaaaaatgtgtcaatgaacggaatcagttaacctgcggtactggcggcaatggttcatcggtaagagccagcatgtcgaccttgaagcttgagccatctgctgattcttctatatttgtgacaaggaaacggcttttaggcaagaagatacgctcctctccaggctcgtcgagtaattcgctgatatcagtgctgttggtgcgttcaagaaaatattttatggtatatctgacgttgatttttccctcttccagctcttgactattgaattggtcgataagttcttcatccgcggtagtgcttaagaatgtatctatttgaatggtttcttcaggtataactttagataagaactctgcgcgatctctgacttcccctcggtaaacttcgctaacgctgctctcttcttcggaaataatatagccgctctcacgtaatgagacattaatatcagaatggttatctaatgctgtgtagacttccgttatttctgtttctaaaccatcattagtggttccatttctcagagcattatttatggccacaaatctatcttcctgaaagtttctaatggcaaagtattctcggaagtttattttttcatgtgaaaagtttgaattatagcgttgtatttcatcgtcaatatttaggttgcattcatctaatttcgtttttccatatataacttcaagttcctcttttattgttgaagtatcattaggtgttatcggtgccatttggtcaattctattcttgtccatcataagattcccttcaacatcataggcatctaccgaagtagaagagtcgtaagaggatgaagaagccgagtcggttgatgaagagttgctgttatccggcggttttattctggggattttagggggaggttcatcacttaaagtggggggatgggtatcaccgaacaggaaaccgaccttgccatttactctctgtagtcgatccgaaattttgggtttaggcttcgatgcggcgggtaatagcggggttcgctctggattgactccgatttgtgagcctggcctagcgatactgactctgggttttgctgccgtagtcgctccgggcttggcaccaaaggtgactttaaaccctctgggctgcggggttgggcccatacttaatacgccgagactgatttcaaacgcgatttcttcgtcggttttgggcggtgctttcccctgatctttcgggacggttttacaaggaactccgcgttcccatttacaatggcgtgactgaaaattggaccagctttctttatttgattgccatctaggttgagcttctcgtccatgggaaatattcaatgctaatgttgtaaataataaagttgaaaatgttatagttaatttcatattcactccttatttgatgagaacgcttttataatataaataatgttataagcacggcctagggtttcaaaattagcattgaattgtaaatttgaatttataaggtaagtggatttgattttatataatgactattacgtatgacgattaattaactgtattatattaattaaggataaaaaccttcacgaatttgcctcggagtgatattaaacgtgcgacgcagtgcggtcgcaaaatttgcggagctggtatatccggcaatggcagcggcttgatcgatactgactccttctttttttaaggccagcatggcgcgcttcaatcggcaatggcgcaaatactcaaataccgtcacgttataattctctcggaaacggcgttgcagcgtgctgggactcatattaattgactgagccagttcttgcagtgaaagttggtcggcttcgccgctttccagccagtcacgtaactgttgaatccgattcaagccacgcagagatattttgttttgctgttggcttgattgttccagtgagctgaatgcctcgataatcagaccgatacactggctttcacatcgtaaccgctccagtggcgtgcggtaggggggcgcacttgctatttgctgggcgatggaaatcgcctggacagatggttgccataaatgaattgccagatgttgctgagtgaagtcgtacagtttctcccatcctccttcctgcggcagcaaatccccatatagccattcgcggtcaaaggtcagcgttaaagtgcgttcatgaccatttttctttccatgccgggtaaataaggtgttctcaacgagagaaatcagagaggaaggccctttctcatgtagctctaatggtttgccaccaaaggatatattcgcgctgccgctcaccacgatagccagtttgagtgagggcgccagacagttctgcgttttgatgtcgtaaagattagtgacattcgccgtatgcagaattaaatgggggttgaggcgcagtacctggaaatcaccaaatagcaccgggtcagtgacagaggatttccctccgcttagacgatagtcgctggcgaccaaattggattgttgcacaatttgctcgggatagatgggtttagaagaagccgaaaccttgcgcatactattttttttcatcgcagacaagatgagccccccttgagcattgtctccatactttttacccgatgacattgacgctgcggcaaagagctttgccgttttcacaaacctttttcctgtagcgcaatgtaacaattagcgcgccgaatgggtaatgaaaataattatcaatcttgtttgtttttgttggctcgttaatcagtcgtcggggactctctccgccgcgatgtgttgcgggcgccagcactagggaaatttttataatgatgaatgtcaaatggcagcggcgctacctggcggccatgatcggcctgtgtctctccacaccgttgtgggcgcaagctcaaaataatatcaaaaccggtacggataccacgtcaaccgaacaaccggaagccactgctacatctacatcgaaaaaaaccaatgcgctagccagtggcgacactttggtggtaactgcagagcagcaggtacgacaggcgctaggcgcttcggttatcaccgcggaagatatacgcaaacggccgccggccaatgatttatccgaaatcatccgaactatgccgggagtgaatctttctggcaattccgccagtggtcagcgcggcaataaccgtcagatcgatattcgcggtatggggccggaaaacaccctgattatgatcgacggcatccctgtttccagtcgcaatgcggtacgttacggctggcgcggcgagcgtgatactcgcggtgataccaattgggttcccgccaatatggtagaaaaaatcgaggtgttgcgtggtcctgcggcggctcgctatggcaatggtgccgccggtggcgtggtgaatatcatcactaagcagccgaacaagcagctacaaggtagctggaatgcttatatgaatgtgccgcagcacagtaaggaaggggcgacccgtcgcactgactttagcctgatggggccactaagcgatacgctcagcttccgtttatacggcagatacaataaaaccgatgccgatgagtgggatatcaacgccggtcatgagtcattgcgcacgggtaatcaggtcgggactttacctgccggacgtgaaggcgtacgtaataaagatatcaatggcttattgcgctgggatttcagtcccggtcagtctctggaattccaggcaggctatagccgtcagggaaatatttacgctggtgatacgcaaaataccaacagtaacgccattgtgcgcagcctgtacggtgctgaaactaaccgcatgtatcgtgagaatgtctcggcaacccaccgcggattctgggatagcggcgttagcactacgtcttatcttcaatatgaagaaacccgaaattcgcggatcagtgaaggtttggccggcggtaccgaaggtattttctcaaaccgcggttttaataccatcaccctggataattacgttgcgcacagcgaagttaatctgccgttcgagtggggcgtaaatcaggtcgtgaccattggggcggagtggaacgatcagaaaatgcatgatccagcctccaatactcaaaccacgaccgaaggcggtagcgtaggcggtttgaaggattccgggcgcaatacgcgcacatcggcgcacattgcttctctgtttgtggaagataatatcgaactgacggaaacgaccatgttgacgccggctgtgcgctacgatcatcacagcaaagcagggagcaactggagcccgggggtgaacctttctcaggcgttgggcgataattttacgctgaaaatgggtattgcccgcgcttacaaagcgccaaatctgtatcagaccaacccggactatctgctatatagccgtgggcaaggctgttacggtggcggcgggagttgctatttaatggggaacgagtctctgtcggcggaaaccagcgtaaataaagagatcggtctggaattccatcaggatgggctgattgctggtgtcacttacttccgtaacgattaccgtaataagattgagccgggtttgatatcaataggtaatgccagcggtgggacaggcgcctacgtggattcagatattttccaatgggaaaacgtgcctaaagccctggtggaaggtctggaaggcagcctgacggttccggttactgatgatgtgcagtggagcagtaacctgacctacatgctgaaatcggagaacaaaaccaccggggattatctttccatcacgccagagttcaccttgaatagctctctgagctggcaggcgacagacgatttatcgttaatgaccaatgtggtgtggtacggtcgccaaaaaccgaagaaattcgactatcagggaaatctggtcacaggtactgcgaccagagaagtcagtccttacgcggtatttggtctgagcggcagctatacgctgactaagaatgtcagtgtcactactgggattgaaaatctgtttgataaacgccagttccgtgcgggtaacgcgcagagcgtggcgggtattgaaggtgccggagccgcgacctataacgaaccgggacgcactttcttccttagcctgaatacgcagttctaatcgttaattttattgaataaaatcgatagcccgtagcgatacgggcagtttttgataacaaatatccgcgcaatcaatcatctgttaacccccagtgacaggctagaaataaagctacttcacgagtgaaacagcaaatggttttgggctatcaaactcccaccgcctgatttcttaaccataaaaattgaccgttatcggattgaccttattttctgctccctatgctaacccttactcctatcagcctgatccgcaatacataacctgcacggagagatagtatccattgcaaaaatatggttattatgttgcggagtatttatcaccgaaaccacttggttagccacgaattgatattccaaacaaatttttcaggtgattacactgtgctcaacgattcagcaaaaatttaatgttgcttttatgtgaacgaattaacaaccagttcagatcctgatatgctggctgcgcagaaccgggcacttaccctacaactttaggcatcgatttcggtgaccggagagaacggttagccaggcaaaataaatgataatgaaagcgaggagaatgtcgtgctagaagaataccgtaagcacgtagccgagcgtgccgctgaggggatcgtcccgaagccattggatgcatctcaaatggccgcgctggttgaagcattaaagaatccgcctgtgggcgagcaagaattcctgttagacctgctgattaaccgcgttccacccggcgttgatgaagcagcctacgtaaaggccggtttcctggccgccatcgccaaaggcgacgcaacctctccactgattactcctgaaaaagccgtcgagttgctcggtactatgcagggcggatataatatccatcctctgattgatgcactggataacgaaaagctggcacctatcgccgctaaagccttatctcacacgttgctgatgttcgataacttctatgacgtggaagaaaaagccaaatccggcaacccgcatgccaaacaaatcatgcagtcctgggccgatgcggaatggtatctgtctcgcccggcgctggcggataaaatcaccgtgacggtgtttaaagtgaccggtgaaaccaacaccgatgatttgtctccggcacctgatgcctggtcgcgcccggatattccgttgcacgcactggctatgctgaaaaatgctcgcgaaggcatttatcccgatcagccgggcagcgttggcccgattaaacaaatcgaagaactgaataagaaaggttttccgctggcttacgtcggtgacgttgtgggtaccggttcttcccgtaaatctgccacgaactcagtgctgtggtttatgggggacgacattccttatgtgccgaataagcgcggtggcggtgtggttttgggcagcaaaattgcgcctatcttctttaacacgatggaagatgccggggcattaccgattgaagttgacgttgccaagctgaatatgggcgatgtgattgatatcttcccgtatttgggtgaggtacgtcggcacgataccggtgaagtgctggcgacatttgaactgaaaaccgatgttttgctggatgaagttcgcgccggtggtcgtattccgctgatcgtcggccgaggtttgaccactaaggctcgcgaagccttaggtttgccaccgagcgaaattttccgtcaggccaagccggttgccaaaagcaataaaggcttttctctggctcagaaaatggtcggtcgcgcctgtggcgttgatggtgtgcgcccgggtgaatactgcgaacctaaaatgacctccgtgggatctcaggataccactgggcctatgacgcgtgatgagctgaaagatctggcgtgtctgggtttctccgctgatttggtgatgcagtcattctgtcataccgccgcttatcctaagccggttgatgtgaccactcaccatacgttgcctgatttcatcatgaaccgcggtggggtttccctgcgtcccggtgacggtatcattcactcatggctgaaccgtatgctgttgccggataccgtcggcaccggcggtgactcccatactcgtttccctatcgggatttccttcccggcaggttcgggtctggtggcgtttgctgctgcgactggcgttatgccgctggatatgccggaatcggttctggtgcgctttaaaggcaaaatgcagccgggtatcactctgcgtgatttggtacatgccattccttattacgccattcaggaaggcttgctgaccgttgagaagaaaggaaagaaaaacatcttctctggccgcattctggaaatcgaaggcttgcctgagctgaaagtggagcaggcatttgaactggccgatgcttcagccgaacgttctgccgccggttgtaccattaagctggataaagcgccgatcgaagaatatttgaaatctaacgtggtattgctgaagtggatgattgccgaaggctatggcgatcgccgtactttggagcgccgcattactggcatggaaaactggctggctaacccgagcctgttagaaggggatgccgacgcagaatatgccgcagtgatcgaaatcgatctggccgagatcactcaacctattctgtgtgcaccaaacgatccggacgatgctcgcctgttgtctgacgtagcaaacagcaaaatcgacgaagtctttatcggttcatgcatgaccaacatcgggcacttccgcgccgccggtaagctgttggatcaacataaaggtcagctgcctactcgcctgtgggtcgcgccaccaaccaaaatggacgccgctcagctaacggaagaaggctattacagcatctttggtaagagtggggcgcgcgttgaaattccgggctgttcactgtgcatgggtaaccaagcgcgcgtggccgatggggcaacggtagtttctacctcgacccgtaacttcccgaaccgtttgggtaccggtgccgatgtgtatctggcttcagctgaactggcggctattgctgctttgttaggccgtctacctacgccggatgaataccagacttatatggctcaggttgataagactgcggttgatacttatcgttatcttaatttcgataaattaaatgaatatacagagaaagctgacggcgtcattttccagactgcgctgtaagctattttttgtattaatcattaattttactaataaattgaagggggccgatggcctcctttttattgccttgtattccgtgctacgggcgatttcctccgtgatttctgagtattactcgcgatagatcactctaggtttcgtttctgacagagtgagtgagcggcatttgattctctatttatcacctgttctccccgttgaatgccttgtcgaaacattagattatctttgttatccactgcaatagactacgctttcaaagcagccagcggctgtaagcgtgcgttaatcctttctttttcacagcggaaattacctaatgacgacacagacctccgattcatattcgataaaaaatcataataggatggcaggtaagcgtgtacttattactggtggtacatcgggtatcggtttggcagcggcaaagctaatgttgcagcagggcgctcaggttgcgattacggggatcacaccggaaagcctggagaatgcctgtaaaactctgcccgcagccagaatttatgccagtgattccggcagtattcagcaacagaggagattggctgaaaaagttaaacaggattttggtcagttagatgccttggtactgaatgcgggaatggggatttggcattcactggaagattggaccgaagctgattttgatcggcagatgtcagtgaatttcaaagggccgttcttcttactacaagccttaagacccttgctgagcaacccggcctccgtagtgataaccacttccattgccgctcatcgtggcttgcttggtgcgccgatttacggtgcttccaaggcggcgctgctggcggtaatgcgtggtttaaccacggagttggccggcgatggcatcagaatcaacgcgatttcacccggcccggtgaatacgccaatattgtataaacagggaatggatggggataaattccacgagcagtttacgccgctgcttccagtgcaacgtttcgctgaagccacagaaattgctcaggctatcctgttcctggcgtctgatgaatccagctacttgtacggaagtgacatcgtggtcgacggcggcctgatggcaacattccccggctaatgcagataagtaggatgcaaacctttcaaactgcggtttaagccgctatatttcgcatctaaatacgcggggggccaagggtctcccgtttttattgggtgtaatcgcaagatgttgcataactttgcgagcttggacttagttagcccgccaataatgtttaaactaatagtaagagcaataggagggcgtgctatggactatgaatttttgcgtgatctaacggggcaggtaatcgtcagattctccatggggcatgaagtgatcggccactggctcaatgaagaaattaaaggtgacctgactaaactcgatgagatcgagaccgccgcggctcaggtcgccggtagtgaacgccaatggcagcaggtgggtcatgaatacactttgtggctggacggtgaagaggtgatggttcgggctaaccaacttgattttgaaggcgatgaaatcgaagaaggtatgaactattacgatgaagagagcctctgcatgtgcggattagaggatttcctcgccgtgttaaaaggctaccgagcctttattctgaaatattgatttttatttttctcttggtgaggctggcgatcggctggcagaccaacacagcagcgaaccggctaccaccattccgacgcccgggagaaatgcggctgacggcggcgtactgagccataaactggcgatcagtactgacagcaaaggcgtaaaatatgaaagggcagcgaccaacgtggcgttgccctttttcatggcgctatcccagcattggtaggccagcgcagtactacagcccatcatcaacagctccatgactgcccgcggtgtaaaatgaagtggccccggtgtcagggtaaaaaacagtagccacaggcacagcgcacaggccagaagaaacagcggcagtacacctcggccacgactataaacacgcaccagattggagtaaatagcccaggcaaaggcagcgagcagcgctaagctataagctagcgggttatggttgatattcgtggccaagatactgatatccagaccatttccaccgctgacaacccaaataacgccgaataaggcaatggctgcccctaaccatagccaccagcgggtgcgtaaccgcagtagtacgacggcgaaaagcagagtgaggctgggccacagatagttgattaggccaatttccagcgtctgttggcgatcgctcgccattccgatggcaatagcaaaggcaaccatataaataacgaataacgcaccgcatccccataaatatgctggatgctgcccgcgaatctgcggtttaccgcccaccagccagaccagtattccgctgacgctatagatcgccgctcctgcaccaaaggggcctaaggtttcggctaacccacgcgtgagtgcgacactcatgctccaaagtaaaatagcaactatgcccaataatgtagcggtacgttccatgtcggcaggctcagcgtcggcgatgaaatatcagccagccagagtacgacattcgagcaggaaaaaatgggatgatgggttgatttatcgttgttttatcggaaagaaagcgtggcgaggataaaaaacacaggcaggaaaacctgcctgtgagccatttcgcgtcgatcatacttccggaacgttgcgcccgtagtagatttcctgcatttctttgtacagcaaacgagtgatggtttctctttcttcatcgctcagttgttctggcttggcgttaaacagatagtgcttcagatcgaagtctttcagcatcatcttggtatggaacatgttttcctggtaaacgttcacatccatcatgtggtacagcgacttcatatcatctgacataaagttctggatcgaattgatctcatgatcgatgaagtgcttcacacctttaacgtcacgggtaaagccgcgtactcgataatccatagtcacgatatcggattctagctggtggatcagatagttcagcgctttcagcggtgaaataacgccacaggtagaaacttcgatgtcggcacggaaagtacatagcccgccttcaggatggctttcaggataggtatgcacacaaatgtggctcttatccaaatgagcaaccacggagttaggcagcgggccgggatgttctgatgtatcgacatcacgaggatcgatgggctcttcgctgactaagatagtgacactggcaccctgaggatcgtaatcctgacgagcgatattcaaaatattcgcgccgatgatcgagcaggtttcgctcaagatctcggtcaagcggttggcattgtattgttcgtcaatgtaggcgatatagccatcgcggtcatctgcggtcttggcataacaaatatcgtaaatacaaaaactcaggctcttggtcagattgttgaagccgtgcagtttaagcttgtgcaatttagttcacctccttacggattaatactcaacgttttgtggaaagtgcattcagcagatactgtggcagggcaaagctaccgacatgaattgctggattatagtaacgacaggtcaggcctgcgtgttcaaaccgggcttgcagtgtagcgagatctaactgacgcagcgccgggttttgcgtagcccaggcaaaggtcatgataccgccgtaatatgtcggaatggctgcctgatagaaactgacatcgccgaaatagttgctgagttttttgtggctatcgacggcttcatcctgctggaggaaacacacgccattttgcgcgacgaaaataccgccttcgttcagactacgggcgcaaccttcgtagaatgccgaggtgaacaggctttcgcccgggccgattggatcggtgcagtcagagataatgacatcaaacttttcgttggtctgattaacgaagttaacgccgtcgtcgattaccagtttgaagcgcggatcgtcataggctccggcattgtggttcggcagatactggcggcagaattctacgacgccggcgtcgatttccaccatggtgatttgttcaacggtgctgtggcggctgacttcacgcagcatggcaccgtcgccgccgccgatgatcaacactttcttcgcctgaccgtgagccagcagcggaacgtgggtcatcatttcgtgatagataaactcatcgcgctcggtagtttgcactacgccgtccagcgccatgacgcggcctaaaaccgggttctcgaagatcaccagatcctggtgctcggttttctcgcggtacagaatattctctacagagaaatactggccgaaattggcatggagcgtttcataccaaagctctttctgggacatgttagggctctcctccgcggtaacagccatgaaaaatgggcgcaacatcatagccaactctgcccgaggttgcacggttgaatttcagacagaggctattagggcgaattattagttggcgtaggccaataaactcagtgaatcgcgtgccaggaatttgcatttggtgggaaccggaatggcgatgccgcgcaaatcgcgatagctctcttcacccaggtctttcatattgaagctattatagttacgtaaatcccaacggttctgctgggcaaaatacacaatcgcccgcttaatttccgtattaggtagttcgttgtagccgcaatcattcttcagataaacgaaaaccgcagtgagatcggcaagatcttctgcttcggattcggttaaagcttggctggcagatgaaaatccacacagagcgagcagcagcacgactaactttgttcttttcatggcggaaatttgcttatttaattgtcaataaacgttaacacatttggacagtcccacactaaattttcttatagaaccttggtgtgaacgcacagactgggttattgcctcttgaccttaccgcaaggggagggtttaggctcttcactaattatgtactgtgctgcattttctgcactgattaaacattttgaggagacgaccatgcttcgccgtgatttcatcaaattgacggcggctcttggagccgccacttctctgcctctctggagccgagcggcttttgccgctgagcaccctagtctgccgattcctccgttgctacaacctgatgccagcggcaaaatccaattacaactgcaaaccggtagcatggtgtgggttcccggtaaaacgactcaaacctggggagttaacggcggatttctcggcccggcgattcgcttacagcgtggtaaacctgtcactgtaacggtgaaaaataccttgccggaagcgaccacggtacactggcacggattggaaatacccggtgaagtagacggcgggccgcaggctctgattgagacgggcgcgacgcgagaagtgacctttaccgtcgatcaaccggcggcgacctgttggttccatcctcatacccacaataaaaccggctatcaggtggcgatgggattgggcggtctggtactgatcgacgatgacgaaagcagcaaattaccattgcccaagcagtggggcgtcgatgatattccggttattttacaggacaaattgctggataaagacggacagattgattaccagctagacgtgatgaccgcagccgtaggctggtttggcgatcaaatgctaactaacggcgcgcgtttcccgcagcagattacgccgcgcggttgggtgcgcttgagggtactgaacggctgtaacgcgcgatctctcaatctggcgttgagcgatgggcggccaatgtatgtgattgccagcgacggtggcttcctgtcggaaccggtagcggttaaagaactgccgattttgatgggagaacgcttcgaaattctggttgataccgccgatggcaagagtgtggatttagtcactctaccggttaagcaaatgggtatgacattggcgccgtttgatcaaccgctgccggtattacgtttacaaccgtcactggccgccggtagcaaagtactgccggatcaactggtagtgttgcctgcgctggcttcgcttgatggattgaaggaacgctggctacagctgatgatgaatcctcagctagatatgctcggaatgcaggcattgatgacgcgctacgggcatcaggcaatggctggtatgcgcatggatcagcacggcggcatggcgatgatggccgaaagtggtaagaacagcggcggctcaatgggcggcatggatcacggtgctatggggcatggcaacatggccggaatggggcacggggcgcaaaaggccgagagcttcgatttcagccacgccaacatgattaatggtaaggcgttctccatgaccgaagcggcgtttgatgccaaacaggggcaatacgagaaatggaccatctcaggtgaaggggacatgatgctgcatccgttccatattcacggcacccaattccgtatcttaacggaaaatggtcagccaccggcggcacatcgtcgcggttggaaagatacggttcgggttgaaggtgctcgcagcgaagttttggtgcgctttaaccatttagcgaccgccagccagccttatatggcccactgccatctgttggaacacgaagataccgggatgatgctgggctttaccgtcagcgcttaacccgattccccggaccacacgcgtccggggctatttaccttcataatcaactatctgccatttccttcacctgcccttattgcgcacgcgtcgcaactactttcccgctatgctaaactcagcggctttcttcaggtaaccgacgttaaaaacttatgaaacacaccgtagaagtaatgatttccgagcaggaagtaaaagcccgtatcgccgaattaggcagtcaaatcaccgagcattaccgcgacagcggcagcgaaatggttctggtcggcttgctgcgtggttctttcatgtttatggcggatttgtgccgcactatcaatgtttctcatgaagtcgatttcatgacggcctccagctacggcagcggtatgacctcaacccgcgatgtaaaaatcctcaaagatctggatgaagatattcgcggcaaagacgtgctgatcgtcgaagacatcatcgattccggtaatactctgagtaaagtgcgtgaaattctgcaactgcgcggcccaaaatctctggcaatctgcaccttgctagataaaccagagcgccgcgaagttgaagttccggttgagtgggttggtttcaagattccagacgagtttgttgttggctacggtattgattacgcgcagcgttatcgtcatttgccgtatgtaggcaaggtggtcatgctcgacgagtaatggtggtcggtactgcgcgttcgcactttaaggttgggaagtgctcgctatcctcatagacagaaagtccactccggtagctgcgcgccaggctagagtctgtagaaataaccaagggcacaatgtgcccttgacgtgttacatcgctttgccttgtaataatgtcgccatcgcttttcggtagaccatttccagactgcttaggctggtggccgaaacctctaaatcgcgcagcaaaccatcttcaatgccgtaaacccaaccgtgaatcatcgctttctgcccgcgtttccaagcggagcgcacgatagtggagtgaccaaggttgtaaacttgctctacgacgttgatttggcataacacgttgctacgttcttcctgcggtagctcgcccagcaaagagctatgtttgtaccacaggtcgcggatgtgcagcagccagttgtcgatcagccccatttcctcgcctttgattgccgcttcaacgccgccgcagccgaggtgaccacagataatgatatgttcgacctgcaatacatcaatggcgtattgcaccacggacagacagtttaaatcggtatggataaccagattggccacattgcggtgaacaaataattccccggacttcagtccggttaactgctccgcaggaacccggctatccgaacaaccgatccacaggaagcgcggtttttgcgcttgggccagatgctcaaaaaaatcaggatcttgtttgctgatggagtttgaccagctgcgattgttcgcgatgagcttttggatttcttccatcgatgttaataacctgtaataaacgaattgcgataggataatatacggcaagcattatgatttagaaatcggaacagttgtttcgggtgagatacaatgttgtccgcgtcacgtcttcctggcatttatcgggtttccctctgctccctgtgacttgtctctcgtcaaatcagcaggctaacccattgatatttagtcccgaaagacattcattgaataaggttcatgtttacttatgacatatgcactggaattaacgcagttgaccaaaacctacgctggtggcgttcaggcactgcgcggtattgatctatgtgttgaggcaggggatttctatgccttgctcgggcccaacggtgccggtaaatcgaccactatcggtattattagctcgctggtgaataaaacctcggggcaggtacaggtatttggttacgatattgataaggatatcgtcaatgccaagcgtcagctcggtctggtgccgcaggaattcaactttaatccgtttgaaaccgtgctgcagatcgttattactcaggcaggttattacggcgttacccgccgtgaagcgctggatcgcgcagaaaaatacctcagtcagcttgatttgtggggcaaacgcaacgagcgtgccattcgcttgtccggcgggatgaaacgtcgcttgatgatcgcccgtgcgctgatgcatcagccaaaactattgattctggatgaacctaccgctggtgtagatatagagctacgtcgttcgatgtggggcttcctgaaagagctgaatgcgcagggcaccaccattattttgactacgcattatctggaagaagcggaaatgctgtgtcgtaacatcggtattattcaaaacggtgaactggtggaaaacaccaccatgaaacagctattgagcaagctagaatcagagacttttatcttcgacctgggggcgaaaagcgccttgccgcagttggaaggctaccaatatcggctgatagatacttccacgctggaagtggatgtgaagcgcgatcagggtttgaacggtttattcagccaaatgagtgcgcagggtattcaggtattgagtatgcgaaacaaagccaaccgtctggaagagctgtttgttaatttggtcaatggcaacgggggagaaaaagcatgacccgcctgtattggatcgctctgcaaagtatctggatcaaagaagtgactcgatttggtcgtatttggattcagacattggtaccgccagtcatcactatgtctctgtattttgtaatattcggtaatctaatcggctcccgtatcggtgatatgggcggggtggattacatgcagtttatcgttcccggcctgattatgatggcggttattaccaactcttacgccaacgtggcggcctcgttctttggcgccaagttccagcgcagtatcgaagaattactggtagcgccggttccaactcacatagtgatcgtcggttatgtgggcggcggcgtggcgcgtgggatttgcgtcggtattttggtgacaattatttctctattctttgtacctttgcaggtacattcctggtcaatgatcgctttaaccgtgctgttaaccgcgattctattttctctggggggcttacttaacgcggtatttgccaaaaccttcgatgatatcagcctgattccgacctttgtacttacgcccttgacctatctgggtggcgtcttctactccttgacgctgttgcctcctttctggcaggcggtgtctaagctgaatccaattgtctatatgattagcggattccgctatggcttcctcggtattaccgacgtgccattggtatttaccattggggttttggtgctgtttatcgtcgtgttttatggctcagcctggtacctgattgagcgtggccgtgggttacgcacttaatttcaaccttcaggtattatcgttaaaaggacagcactgagctgtcctttttgctatttgcatcgttaaacataaaattctgaaactaaattaatcgtaataattaatgatcttagtgaatatggtctttctcacgctttagcatctcatgctatgctggcttaccagaactctctctttcattcagcgcagttacgcgcataagtagaacgataatgtggcataaaaacagaatagcgattgggatgctactcgttattgtcatgtcggtaatcattccggcagcccatgcagacctcctgcaagaagaaacggcagtgccttctaggtacatggtcgccgatcgtaacagtgaaatttatgcgctgattggtgagcatgtgattcccgttggcgaggttaaaaaagggcagctattacaggttttcccggccgcggcggaatattatgaattcaagtttggccacggcatcggttttattgataaagacgatctgcgtgagattaataaagcccaaaaaatgaatgacagattaggcgatctgaataaaccaacgcctaatcaaaatattctgaccaagcgtgcgaccaaaatttatcttgagccggataccgctagcgaagaacttggcgtattggaagagaatctgcgttacccgattattggcaaattgaaagatcgcctgaataacagttggtatcagatcaacattggcgatcgcttaggctatgttagcggcaatgaaactgaaattgataatggcattccggtgctgacttatcatcatatgctgaaaaatgaagagaataagcgctttaggaatacctcgaccaccacgtctgacgtggcgttcagtaatcagatggcgtatctgaaacaagctggttatgacactatttcgatgtatcagcttgaggcttacttgaataatcaaatcaatctgccggcgaaagtggtcgtgctaacatttgacgatggtttaaaatcggtcagccgttacgcttatccaattttgaaagaacagggtttccgcgctactgcatttattatttcttcgcgcatcaaacgccatccgcagaaatggaaccctgattcgctacagtttatgagtatttcggaactgaaacagattcaggatgtatttgacgttcagtctcacactcatttcctgcatcggaccgataacgcacgtcatccaatcttattgagccgctcttaccataatgtcatttttgattttgagcgatcccgacgggcattatcgcaatttaatccccacgtgatttatttgtcttatccgtttggcgggtttaatcagaatgcgattgaggcggcaaagaattcaggtttccatctggcggtgacgaccatacaagggaaagtcaaaccgggggataatccgtttaccttaaaacggctatacatcttacgcaccgattctatccctaccatggctgagcgcatcgccaaccagccgggagccgttgtagccaagactataccagcggtgattgaggctgagtaggtttgcgaaaccagtctcgtcgatcaaagagaaaggagcctaaaatggctccttttttacgtattgagtaagacgattatatcggctaacgaaagggcgtattgccgtgcctaaatcgctaggcaacctgcaccggaaccgctttggctttgcgctgtagttggttgtcgccttcgaaataggccactttaggatggtgcaaacgggcgtccacgtctgacatctgaacgtaagaacagataatcagtttgtcgccaacgcaagcgcagcgcgctgccgccccgttgacagaaataatgcgtgagccacgctcagccgcgatggcgtaagtagaaaaacgctgaccgttatcaacgttataaatatcaattgcttcgtattcgagaatcccagcggcttccagaaaatcctgatcgatggcgcaggaaccttcatagtgcaaatcagcctgagtcactttaacccgatgaagtttgccttgcagcatagtacgtatcatagccttacccttaaccctaatgtaaaccagcgaatctctgccaggcggagttctctggatgaataacgctgatggcgtcaatactgaggcagcctgcgttcagtatatcgactcagttttgccgattttataggtgctgtctatatattggcgaagcctaccgtaagataaattatgacgaagaatatttctgttggaagactaatggcatggggaataatcaagtcggatacgaactgagcacagagtattttgcttcaggccgtatccggtttatcggataaatgcgaggttagttgattaaatcaacctgctgattatcgatcaaacgggcttttcctaaccaggcggccataagaatcaccgcgcgctggctttcaacggtcagcggttgtagtgtttcagcatcacggataaacagctcatccggagtgaagcccgctgcgcgaagctgttccgccgtggttgccagcaattcatcaatctgacgctcgcccaaggtgagtttttcagccagatcgttcatgattttcgccaactgaggcgcaatcttgcgttcttctgcagtcaaatagccgttacgagagctgagtgccaaaccgtctttggcgcgcttgatcggcacaccgataatctcgatgtcatagcccatatcggctaccattttgcgaatcaacgccaattgctggtaatccttctcgccgaaacaggcgatatccggttggaccagattgaacagtttgctgacgatggtggaaacgccacggaaatgaccggggcggctggctccttctaaaatggtcgataaagcggggacatccacgtaagtctgctcttctaaacctgctggatagacttcgctggctgcgggagcgaacaccagatctacgccttggcgagtcagcttctcacagtcttcctgcagggttcgcgggtagttggctaagtcatccgggcgttcaaactgcatgggattgacaaagatacttaccaccactacatcggcacgggctttggcttcttccaccagagcaaggtgtccatcatgcagattgcccatggttggaaccaacgcaattcgtttgccatcctgacgccaacggcggatttcctgacgtaaaaacggcagggtttcgataatcagcattccctttctcctgagttattggaagcagtgctcttcagccgggtagattccctgctcaacttcctgaatatattgttggatcgccaaacggatatcgccagcctgagccaaaaagtttttgctgaactttggtgtatggccactagtgataccgagagcatcatgcataaccaaaatttgtccgtcagtaacatttccggcgccaataccgataaccggaatggccagctcttcagtgactcggctcgccagttctaccggcacgcattccaacaccaagagctgagcgcccgcctgctcgagcgcaatggcgtctttgagtaattggttggctgcaacttcttcccgaccttgtactttataaccgccaaatatattaaccgactgcggcgtaagccccagatggccgcaaaccggcactgcgcgctccgccagcatgcgaacggtatcgcacagccagcttccaccttccagcttcaccatattggctccggcgcgcattagctcggccgcgtgggtaaaagtttgttccggcgtggcataactcataaagggcatatcggagagcaggaggcagttaggcgcgccgcgacggactgcgcgggtgtggtaagccacatcggcgacggtgactgggagagtggagtcaaagccctgtagcgtcatcccaagagagtcacccaccagcatgacctgaataccttgctcatagaatagttgagcaaagctggcgtcataggcggtgagagtcgcaaacttacgcttttcctgtttccattggcgcaagtgggtcagagtagtcgctttcattattcgttctccagaaaataacccgacagacccgaataacggagcgttatcacacttgcggcctgcaatcagttaacgccagtctaccgctgattagtgcatgtagataaggcagttacattataaatatagtggtctgaatgctagcaaactctcggcaggaatgcacagaagggataaaaggtaggaaggggaacgcgagatagctcgcaacttaatttgcaattaccaagggataaggccgttctttggcaccaatttaaggcgatctaccagggattctccgtcggggaaaatcaagtctggcgcgatgtctgctagcggatacagcataaactcgcgctgtttcagaccgtaatgcggcaccgtcagacgttcggtattaatcactcgatcgccgtacagcataatatccagatccagcgtgcggggtccccagcgctcatctttacgcacacgtccctgattacgttcgatttcctgggtatgatcgagcaattgttctggaggtaacgccgtgtcgagagcgaccacggcgttaagaaaatcaggctgatcctgtggtccaaggggtttagtgcgataaagctgcgaacaggcgaccaaacgggtgcgcggaaggtgttccagcgcctccaaagcggttttaacctgttgcagcggttgtgcaaggttgctgcccaacgcgatataaacccggatcatagacctgttatgccccttctttacgttgggttggcttgcgcggacggcgcgagcgagaacggcgcggcgcagggtcggcacccaaagtattcaacatcgctttttgatgcggcggcgtagcttcctggaattcaccccaccactgagttaaacgctgtagttcatggttgttttccacttctgcacgcagagccagcaaatcgtaggccgcgcggaatttcggatgctccatcagtttgtgcgcccgtttgccctgacggcgagatagacgtaactgcaacagccaaatatcccgtaccagcgcagtaatgcgttttggaatggccagtgaacggcattcttcatccaaaatatcattcatcgccagcgcgaaggcatcgtaataagccagaccgctttcctgcgccagtttttgcgcatgttcgatcaatggataccaaagcatagctgcaaacagaaacgccgggttgacccgcttatcattttgcagacggtcatcggtattttttaatacctgaaccagaattcgctccattggcgaatcattatgctcagtaaaattacgggcaatcagcgggaataacggctggaaaagctgatattcacacagtttaagataagttttgtaaccgtagccggattgcagcagtttgagcgattcttcgaacagacgcgctggcggaatctcacgcagcagcgaagctaagcgcgggatcggctcggcggtttccgggctgatggtcatatccagcttggcggcaaaacgcacggcgcgcagcattcgtaccggatcttcacgatagcgaacttccggatcgccgatcaggcgaataatcccttgcttcagatcgcgcaggccgccggtgtaatcccgcagggcaaaatcggaaattccgtaatacaggctgttgatggtgaagtcacggcgctgtgcatcttcctcgatggatccaaagatgttgtcgcgcagcaacataccgttctgagcttgctgagaagaatttttatcattgccctcaggttgttgctgttcgtgatgaccgcggaaggtggccacttcgataatttccggcccgaacatcacgtgagccaaacggaaacggcggccaaccaaacggcagttacggaacagtttacgaacctgctcgggcgtcgcgctggtggtgatatcaaaatcttttggttttttgccaagcagtaagtcgcggacaccgccgccgaccagataggcttcatagcctgatttattcagacgatagagtaccttcagcgcattatcgctgatttctctgcgggaaatattgtgttgatcccgtgggattaccgtcatttgacgtttttcctcaggctgcaccgcttgtttgacgcggccggtatcagttctagcgggccttttttctttgcgggccactttatcttcaccggtaactttatcttcacggacagttttgtcttcgcggatcagtaccttacggcagaaattggctactcgggtaaaaatggtacacctcgatagtgactaataataaacagaactacggaaaaacagcggctaatcatagctcaccgaggttcctttgagaatgccgttatgttttctggctgagttattgcaccctgatggggaagtaaatccaggctccagtgttcaactgcccagcgtaataataacgatagatcaagatcttgccagctttctgccaccggttgacgcagaaatttcagtgcggcgactaaaattgggcgcggatcgccatcaggtagcggaggcgcgtgattctgcttagatagcttattaccgtcatgattcaacgccaatggcagatgaatataactcggcaccggcgcctgcaactggtgatacagcgcaatctgacgcaccgtaggctcgatcaaatcggctccgcgcacgatttctgtcacgccctgaaacgcatcgtctaccactaccgccagattgtaggcgaacagcccatcacgacggcgaatgataaaatcctcttcagccaacgcgggatcggcatggagcgatcccagcagtcgatcttgaaaaacgtaaaccggatgggtttggcgcagacggatagcggcgttatcgggcggtaaatgcaggttgcggcaatgaccgtcgtagaaaccgccaatttgctgaatgcggcgacgggtacaggtgcagtaatagcttaatccttgttggcgcagccaatcaagggcggcgcggtatgcatcgaggcgttgggattgatagataacctgaccgtcccagtggaggccataatggtctaaagtggtgaggatgcgaccagcagcgcccggaatttcccgaggcggatcaatatcttcaatacgaactaaccaacttccgccttgagcacgggcttgcaggtaacttccgagggccgcaatcagcgagccaaagtgtaaatctccggaaggagagggagcaaagcgccccacatagcgatgattttctgacataaatagagggaggttgctcccgttgtgttatgcggtgccagggaaagcccggcaccgtgttacacgttcttgctgaattagccagccatctgcttttcgcggatttcagccaaagttttacagtcaatgcataaatccgcagttggccgtgcttccaaacggcgaataccgatttctacaccacaagattcgcagaaaccgaaatcgtcatcttctacttttttcagcgttttctcgatcttcttaataagcttgcgctcacgatcgcggttacggagttcaagactgaattcctcttcttgagcagcgcggtcaaccgggtcagggaagttagcagcttcgtcttgcatatgagatacagtacgatctacttcatccctgagctgattgcgccatgcttcaagaatcagcttgaaatgcgaaagctgggcggcattcatatactcttcgcctggcttctcttggtacggctccaccccagcgatggcgagaatgctcaaggacgaggttttacgtttttgcccttcttgcatgatgcttctcctacattcatacgcactatcgaacgattccccaaagtacgggggaaaaatcaggccgctataaataacagatggaaggtaggttggcaattattcctgtcgcctgcttgacaatgctgtgaaggaaggcgtatttggcgagaccctatgcggcaatcggctttttattcagcagttggccactagtgactaaaccgttaataacggtatacgagcagcaagctcaataccgccaggcgatagttgaaaaccgtaacagataacttccaccccagacgcttgagcctgcgccagcaaatcggcataacgcgggtcaatatgtcgggacgctgcaacctgggtaatacccgaatgcaatacggcaaagaacaatactgcccggtgcccatcggcaacctcgttttttagctcccgcagatgcttctgaccccgtagcgtcaccgcgtcggggaaatatccgcactgttgttgcaataaggttacagacttcacttcaatatagcagttggatctattttctgcctgtaataacaagtcgatacggctattttccgcgccgtactttacctcagggtagacagcactgtaaccggataattctggtattgcatccagtgttattgcttcgtagactaactcattggcacgcatagtattaacgcagatccaatccccggtttgggtatgggtgagctcccaggtatggggatatttacgcttaagattgtccgaagtggaataccaaactgtgtcacccggtgttgcacatccggtcatggctccggtattggcgcagtgaatagtgagggtttcaccttcgggcgtcatcacatccgctagaaaacgcttataacgctgaatcagagtggcgtgttgcagcggggtcttaaatcgcatcttgtttcctttttttctcacccaatggccagctttgtatcactttatagcgagtacgcccacggctatagacggattcataaagcgagaactggctcggcgtaaattggccggcgtctactttgggcggcaggttgaccgggcgtgtggcatggcgaaacagcgtgacatgggggtgaaacggcatcgggttttggtagcaaccgctgcgtgccgcctgagatcgcagcaattctgctagctgtagcaatcctctgggggcttgtttacagccgagccataccacgccggaaccgggccagtggccgagatcgtccagagtcacggtaaaggccggctgctcgatacggccagccagttgccgaagcgcctgcgatttctgctcgctcacttctcccagaaaggccagcgtcaaatgcagattggcggcggcgatcgggcggccggtttcttcggggaaatgatcggctcgccactgaataatgtgctgttggcgcgatcgcggcagtgccaaagcgaaaaacaggcggcggctcggattatttgctaaatctgtcattaataaggtttcgcatcgttaaagcctggctaaatacggcgtaagggctagatgctacaatgcctgactgtgaaagttaaccttcgtggagtgtgctgtgtcttctttgcccgtcagtgctgttgttgacgatctattatctgcgttgcaatcttcgccgcaagtcttgcttcatgccccaactggcgcagggaagtccacttggctgccgctgcaaattctgcaacggggcgggttggcaggacgcattatcatgctggaacctcgtcggctggcggcaaaaaacgtagcttatcgtttggcgcagcaactgggggaggaaccggggcaaaccgtgggttatcgcatgcgtgccgaaagtaaaaccggcccgaatacccggctggaagtggttaccgaaggtattttgacccggatgttacaacaggacgctgagttgcaaggcgtgtcgctggtgattctggatgaattccatgagcgtagcctacaggcggatctggcactggcgctgctgttggacgtacagcaagcactgcgggaagatttgaagctgttaattatgtcagcaacgctggataaccaacggctttctgcgttattgcctgatgctccagcgatcgtttctgccgggcgcagtttcctggtagaacgcagctatcagccactatccagccatgagcgattagaggatggcgttgccaaccgggtgaaacgcttactgaaccaagaatctggttctctgctgctgtttttacccggagtgacggaaattcatcgggttatggaacgtttgagcggtgaagtggccgcagataccgatctttgtccgttgtacggcgcactgccgctgggcgagcagcaaaaggccattcagccagcggctacgggtcgccgcaaagtggtgttagccaccaatattgctgagaccagtttaaccatcgaaggcattcggctggtggtggatagcgggttggagcgggttgcgcgttttgatcctaaaaatggtctaacgagattattaactcatcgtattagtcaggcgtcaatgattcagcgggctgggcgagccggtcgattagaatccgggatttgctggcatctgtttgccaaagagcaggcggagcgagcgccggaatacgccgagccggaagtgctcagcagcgacttatgcagtttctggctggaactgctgcattgggggtgtcaggacgtttcccagctaaactggctggattgtccgcccgcgtctgctttatcggcggcacaggatctactgcggcgtttgggagccattgatgacaacggccagttgacgatgatggggcgatctatggcggcgttgggctgtgagccgcgtttagcggcgatgctgtgtgcggcggcgaagcatggcgaggacgcactggcgacagccgcgctgctggcagcaattattgaagaacccccacgcggcggccagatcgatttacatgattggctcagtcgccctcaggctcattggcagcgacgcgccagacaattacagcaacgtttgccgcagcgggcaggcagcgtcaatagcgatttggccggttggctattggcactggcctatccggaccgtattgcgcagcagcgtggccaggatgggcgttatctgctggctaacggtatgggcgcggcaatggcgcaggatgaagctttgtcgcgtgctccgtggctggtggcgatgagtttgttacaaaatgccagcgggccggacgcacgcatcttgctggcgctgccggttgatatcgatcaattggttaaacagtctccccactgcgtgacggaacaaacggcggtggaatgggatgaagaaaaagggactttgcgcgcctggcgccgctggcagattggccgcttaactctaaaagcccagccgttgagcaaacccagcgatgaggcgctacagcaggcattgctgaactgggtgcgtgagcaagggctaaatgtattgaattgggatgagaatgcccgccagcttcgcactcgcctacattgtgccgcgcgctggctgccggaggccgaatggcctgcggtggacgatcagagtttgctggacaatctggcgctgtggctacaaccctctctacagggtgttcgcgatttgcgcggtctgcggcaggttaatattgctgaagctttaacccgtttattaagctggcaacaacgtcagcggctggatagtgcgctgccaagtcattacactgtgcccacgggtagccgcctatctattcgttattatgatgataaaccgccgatattagcggtgcggctacaggaagtttttggtgaacaaagcagcccgcgccttgcagaagggcgggttgccgtggtgctggagctgttatctcccgctcaccgccctttacagattaccggtgatttggccgcgttctggcagggagcctatcgggaagtacaaaaagagatgaaagggcgttatcccaagcatgtctggccggacgatccggcgaataccttaccgacccggcgcaccaagaagtatcagcgctgattatttcagatgtttcctcttcccccgctctgaggtggaggggacattaagcggctatgccggccaatacgcgtggaagtagtggagaaaatgcatgtcagatgaccgcgagcctacggggcgcaaaggtaaaaaacctgcggccaaatccgcgttgaaacggcccttgggtcgccgacgtaatgaagatgattatgaagaagactatctggatgatgatgatcgcgacgatgatgactatgacgacgaggataaacccgtgccaagaaaggtaaaatcccgtcctgcgcgcaaaaagcgccgttggctcggcctattgatcaaactgtttatcgtggcggtggtattgctggcggtttacggcgtatatcttaactcgcaaatccgcagccgtattgatggcaaagtttggcaactgccagcagcggtttatggccgcatggttaaccttgagccgggcatggcttacagcaaaaaagaaatggttaatttgctggaaggaatgcaataccgtcaggtgagccgcatgacccgaccgggcgagtttacggtgcaaaacgacagtattgaaatgctgcgtcgaccgtttgatttcccggatggtaaagaagggcagatccgcgctcgtctagtattcaaaaacgatcgtctggcgcagattgtcaatctggataatcagcgagatttcggtttcttccgtctcgatcctaaattgatcactatgctgcaatcgccaaacggcgagcagcgcctgtttgtaccacgcgctggtttcccggatctgctggtagataccttgctggcaacggaagatcgtcatttctacgagcacgacggtatcagcccttattccatcgggcgtgcggtagtggctaacctgaccgcggggaaagcggtacagggcggtagtaccttgactcagcagttggtaaaaaacctgttcctgaccaacgagcgatctttgctgcgtaaagccaacgaagcctacatggcgctgttggtggactatcgctatagcaaagatcgtattctggagctgtatctgaacgaagtgtatctcggtcagagcggcagcgatcagattcgcggtttcccgctggctagcctgtattactttggtcgtccggtggacgaactgagtctggatcaacaggccatgctggtagggatggtgaaaggggcgtcgctgtacaacccgtggcgtaacccgaaactggcgctggaacgacgcaatctggtgctgaaactgctgcaaaatcaggggatcatcgatgttgagctgtataacatgctcagcgcccgtcctctgggcgtacagccgaaaggcggcgtcattacgccacagcctgcctttatgcagatggttcgtcaggagctacaggaaaaactcggcgacaaggtaaacgatctgtccggcgtgaagatctttactactctcgatccggtatcacaggacgccgctgagaaatccgtggaagacggcgttccggcgctgaaagcggcacgcaatatcaaagatctggaagcggcggtagtggtggtcgatcgctttaccggcgaaatccgggcaatggtcggcggcgcgcagccacagtttgccggtttcaaccgggctatgcaggcgcggcgtttgattggttctctggcgaaaccggcgacttacctcaccgccctgagtcagccggacaaatatcgcttgaatacttggctggcggatcaaccggtgtctatcaaattgccgaacggcaccagctggcagccgaagaactatgatcgccagttccgtgggcaagtgatgctaatggatgctttggtaaactcgctgaacgtaccgacggtgaatctggggatggcggttggtttggatcaaatcagcgccacgctacaacgcttgggcattcctaaatcggtcattaacccagttccggctatgctgctcggggctatcgatctgacgccaatagaagtggcgcaggagtatcagactattgccagcggcggtaaccgagccatgttgtcggcggtgcgctcggtgattgcggaagacggtaccgtgctgtatcagagcttcccgcaggcggagcgtatggttccggcacaggcggcttacctgacgttgtacaccatgcagcaaggggtacagcgcgggacttctcgatctctgtcagccaagtttgggaaatacaatctggcggcgaaaaccggtactaccaacgatttgcgcgatagctggtttgccggtatcgatggcaaagaggtagccattgtttgggttgggcgcgataacaatggtcccgccaagctgaccggggcgaacggggcgttaacgctgtatcgtcgctatctggaaaaccaaactccgctgccgttgatgctacaaccgccggaagggattagtcagatgagtattgattctgccggcaactttatttgtgacggtggcagctggcgcaccataccagtgtggaccgaaaacccgcagggcttgtgtcaggcagcggctgaaccgcagccacagaccgaaggtgacggcgtagccggttggatcaaagatatgttcgggcagtaacttcccgctaaactggcgcggcttcggtcgcgccaatcctttcctgattttccctcgtattatccctgacgtccgctcttttgatctggctcagagttatcccgccgctatccgtggatgatgctggcccctctgagagtgctcagcggtggcaggcaatgctgtttttccgttaatatcatcgctgattatcgtccgcccgcagatcttgcagtgggttggttattacgcataaactgattgctttgataattattatcgtttttattcattttctcatcgtgccgttataacagggcgctatgctaggtaatatgcaggatagacaggctaggcaatccagtaacttcactcttcgggaactgagtttttccgttcccggccgaacgctattacagccgttgtcgctgagttttccgcagggaaaagtatgcggattgattggccataacggttcgggcaaatccaccttgctaaaaatgctgggtcgccaccagttgccatccgccggtgaagtgctgctaaacgatattccgttgagtcagtgggataacaaagatttcgctcgcgaagtggcctatctgccgcagcaattgcccgctgcagaagggatgacggtgcgtgagctggtcgctattggccgctatccgtggcatggagcattggggcgttttcggccagaagatcgccaacaggtggaggacgctatcgcgctggtggatctcaagcctttggctaatcgattggtggacagcttatccggcggcgaacgtcagcgcgcctggttggcgatgatggtcgcgcaaaacagtcgctgtcttttgctggatgaacccacttccgcgctggatattgctcatcaggttgaagtactgagtttgatccaaggtttgagccacgagcgcggtctgacggtgattgcagtactgcatgatattaatatggccgctcgttactgtgattatctggtggcgctacgcggcggtgaaatgatcgcgcaaggagaatctgaatccctgatgcagggctcagtcttggagcaaatttacggcatcccgatgggaattctgccacatccagccggcggtgcgccggtaagttttgtctattaatgaatcgattttcctctgctgtacccgatagagaacgtcgccgtttgctgatagccctggcggtttcgccattgctttttgccctgccgggccgagctgcatcttatcctgatagcgacaagatcgtagcgttggagtggctgcccaccgagctgctaatggctcttggcgctacgccgctgggcgtggctgatattcataattatcgccaatgggtggaagaacctaagctacccgccagcgtgattgacgtgggtcagcgtaccgaaccgaatctggagttgttgcagcaactggctccctcactgattttactctctgaaggctatggccctacgccgcagaaactggcacctatcgcaccgagtatgagttttgcttttaacacgccgggtggctcgccgtttgcatcgggcagaaaatccgtgcgtgccttggggcaacgtttaggaatggagaaagcggcagagcgtcatctggccgaacttgacgcttttatcctcgccgcccgtgggcgattgcagggctataactcaggttcgttactgatgttttctttgctggatagccgccatgcgctggtgatagggcaaaatagcctgtttcaaggggttcttgacgagctcaacatcaaaaatgcctggcagggggaaaccaatctgtggggcagcaccatcgttggtatcgagcgtttggcacagattaatccggggaaagctatctgttttaaccacagtaacgaccagttgctaaaacaggtttccagtacgccgctatggcaatcaatgtcctttgtgcgccagcaacggttgcgggtactgccgccggtatggttctacggcgcaaccttatcggcgatgcgttttgttcgtttactggaacaagcgttggagcaaccttcatgagtgccgctttcctgcgttctcaacggttaatacctatagggctgatttctctgctgttggctttcggtgcggcgttaacgttgtataacctcaatcaattgctcccgtttaccgactggtctcaggcgctatggtcgcccaatatcgacgatgtgcgacaaatgctgttttattacagccagttgcctcgggtggctgtagcgttactggccggtgccggtttaggtctggtgggggtattgttccaacaagtattacgcaacccgttagctgaacctgccactttgggggtgtctgccggtgctcagttagggttgacggtggcaacgctatggatgctgcccggcggtgatttcacgcgtcaactggcggcgatggccggtggtgtgatcgtcggcttactggtatttggcgtggcttggggcaaacgaatgtccccgataacgctgattctagccggtttggttctggggctgtattgcagcgcgttgagtaacttactggcgttgtttaattacgatcaactacagggacttttcctgtggagcagtgggacgctgaatcagcaggattggagcgcggtgcagtttattctgcctcgcctgttacttgccgggctgttggcggctctgctgatacgtccgctgactttactggggctggatgatggcgtggctcgtaatctggggctaggcctgtcgctggctcgccttggtgcgttggggctggcgatcattttcagcgcgatgctggtcaatgccgtgggggttatcggttttattggcctgtttgctccgttgctggcgaaaatgctcggcgcgcggcgcttgtcgcagcggctgctgttggctcctttcatcggtgcgttattactgtgggtgaccgaccagattatggtttggctcacaccggtgtggcgtgaaattcccaccggtgccgcgacggcgttaatcggcgcgccgctgttgctatggctgttgccacgtttacacagtgtcacgccgccggcgatgaatattggcgataaagtgccggaagagcgccaaggtttactgagatgggctagcgccggcttattactgttactggcgggattggcggtggctctgctgtttggccgcgacggtcatggttggcagtggattggcggcgatcatctttcggcgctgttgcaatggcgctggccgcgggttctggctgctctggctgccggaatgatgctggcggtagccggtgcgttgatacaaaaactgaccggcaacccaatggctagcccggaagtgttaggtattagctctggcgcggcttttggcgtggtaattatgctctttattgtgccgggcaatgccttggtatggttgttacccgcaggtagtttgggtgcggcggtgaccttattcctgatttcgtttgtcgccgggcgcggcggtttttctcccggcagaatgctgctggcggggatcgcggtcagtactgcgtttaccacggtaatcaccatgctgctggccagtggcgatccgcgaatgcgtggtgtgctggcgtggatttccggctctacttataacgtcaccggttcacaggcattatctaccgccattatcgcgctggtgctgatggctttggctccgctatgccgtcgctggctgatgattttgccactgggcggtgtaacggcgcgagcggtaggaatggcactggctcctagccgcctggcgatattgctgctggccgccagcctgaccgccgccgccaccttaaccgtgggtccgttgagcttcgtcggcctgatggcgccgcatatggcgcggatgctgggcttccgtcgtgctattccacagttaatcattgcggccatcatcggcggcctgctgatggtgtttgccgattggttcgggcgtatgctgctgtttccttaccagattccggcgggtctgctggcaacctttattggcgcgccttacttcgtctatttgttacgtaaacagagcaattaagccttttatcaggcgcagagaagactcgtgctctgcgccaagtcctgccattttataggggtattataccctcaggaaattattctaacctgacgtaaattcaccgttgaaaactcggctaactcaccgtatttattcgtgattttctgtcgcgatcgcattttgaaaagcctgttaataatttatttgtgaatggaaattatttgtattagtgtttacgcgtttttacactccgtcataacttccttcgcggtacgctaatgaaaaataatcgtcagaagttgttcacagaaactgttgttatcgccacggcactgctgagtggcagtgcttatgccgccgctgagactaacgccgatactatggtgatctccgccagtcgcactaataaaaccgtggcgaatattgcccagaccacctggattatcgataaccagcagatctccgagcaggccggcggcggaaaagatatcaaagaaattctggcgcaattggtaccgggtatggacgtcagcagtcaagggcgtactaacttcggcatgaatatgcgtggccgcgaaatgatggtgctcatcgacggagtgaggatgaatacctcccgtgccggtagtcgtcagttggattctatcgatcccttcaatatagaacgcgtagaagtgctttccggcgccagcgcgctgtacggcggcggcagtattggcggtttggtcaatatcattaccaaaaaaggtaagccgggttccgagtttgaattcgcaaccggcgctaaaagcggtttcaataatagcgatgatatggataacaactttggcgcggcgtggagcggcggcaatgaacatattgacggacgcctttctgcttcttatcgtcggtttggcggcgggtacgatggcaaaggcgatcctatcaccatggacatcacccagaccggtttacagtattccgaccgtctggatctgatggccaatggcggtattaatctggatactaatcgccgtatcgaagtgctggcgcagtattacaaaagcgccggtgatggcgatcacgcgctgtatttagggaaggatttctccgttgtgaccggcaaaggcggaaacgcagaaaaccgcagcggtatgtattcggaccgcattcccggcacgcagcgtaacttgctgaatttcacttataccgataaagatttcttcggtcaggaattgttggctcaaacttattatcgtaacgaaaagctggatttccatcccttcccgcggctgagcgccaataaaacccaagtcgatagttattccacttcgcagcaaaatacccgtcaatacggtgcaacggtagccatgaccagtcaattgaccgacaggtggaatctgacttacggcgcggatattgatcgggaggagtttgatgctaatcagatgagcttcgatatggcgaaagccaatgccagtggcggcatgaatatgagcagcatttatcagattggccgctatccgggctacagcgtgactaatagcgcactgtttatgcaaacggactatgcgttaacggaaatgttcacgctgaacggcggtgtgcgctatcaatatgcgaaaaacaccatcaacgactttgtgggaaccactcagcaggaagccgttgcctctggtcaggctaaaagcgccgatgctattcccggcggcacaaccagctacgataatctgttattcaacgctggcgtattggcacatttgactgaaaatcagcaaatgtggctgaacttctctcaggcgttccaattgccagacatcggtaaatattacggtcagggcaactacgtcaaagtgggcgaccactatcagctaaaagacagcattaacgtagcggattctcgcctgcaagggattaaaaccaactcctatgagttaggctggcgctacctgggcgataacgtcacgacccaattggcggcctattacacgcagtcggataaatcgattaactacaataaatccacgttaaatattgatgtggtggatagcaaacgtcgtatttacgggattgaagggcaagttgattacagtctgccaatgccagaatggactaccggtgcctctttcaacctgattcgctctgaaaaccagacaaaaacgggctggagcaaagtgactatcactgaagccagcccgtcaaaactgaccgcttatgtaggctggacgccgggagactggaatttgcgagtacaaactcagcaggcgttcgacgtgaccgacggcgcgggaatgaaactggatggctacaatactgtggatatgttgggttcttacagtctgccggtgggcaaggtttctttctctatcgaaaatctgctggatacggaatacaccacgatttggggccaacgggcgcaggtcttctacagcccgctttatgggccggcctcgctgtatgatttcaaagggcgcggacgaacctttaatctcggttattctgtgactttctgatagcccgcagggaataaaaaaacccgcttaaaaggcgggtttttttacgtttaacgtcaggtgaacattacagcttggcgaaacagcggcgagcggcatccacggttttctgaatgtcttctgcgctgtgcgctacggacataaagccagcctcaaaggcggacggcgccagataaaccccttcttccagcatcagatggaagaagcgtttgaaacgttccacgtcgcaagccatgacgtcctgatagcaagtcactgatttagcgtcggtaaagaaaaagccgaacatgccgccaacgtggttaaccaccagcgggatattctcctcttttgccgcatgcagcaggcccgcggccagagtgtcggtcagctcggtcagagtttcatgtacgccaacctgcgatacttccgtcagacaggcataaccggcggccatggcaatcgggttaccggacaaagtccccgcctgataaaccgggccggtcggcgccagcgcttccatgatttcctgacggccaccaaaggcacccaccggcataccgccaccaatgattttacccagacaggtcagatccggctctacattgtaatagctttgcgcacctgccaatgccacgcggaaaccggtcatgacttcatcgataatcagcagtgcgccgaactcgtcacacagcgcgcgcaggcctggcatgaattctggcagcggcggtacgcagttcatattgccggcaaccggctcgacgatgatgcaggcaatgtcctgcggatattgttcgaaagcggcgcgaacggaggccaaatcgttgtaagtacaggtcagggtgtgcttggcgaaatcagccggaacgcccggagagttaggctgcccaagggtcagagcgccggaaccggctttaaccagaaggcaatcggcgtgaccgtgataacacccttcaaacttgatgattttgtcgcgatgagtatagccgcgcgccagacggatggcactcatggtagcctcagtaccggagttaaccatccgcaccatatccatggttggcaccagattggtgaccaactcagccattttcacttccatctctgttggagcgccgaagctcaggccgcgctcaactgcttcaatcaccgcattgcgcaccgccggatgattatggccgagcaccattggcccccaagaaccaacataatcgatataggctttgccatcgacgtcgaaaaggtaagcgccatcagcccgatggataaagagtggtacgccaccgacaccggtaaatgcacgcaccggagagttaaccccaccggggatcaactgttgcgcttgggcatacaaactttcggacttattcattaactggctcctgaattgggcttggcaaggaattaatccgttcattctaaagtactgacggcggttatcaaataattgggcatctttcgtgtaggaatgcgggctataaactgctttctcattaaggaagagagatcgccaattagcggcatcctgcgccagatcatgcgtcttcggattttatgcaggcgaatagatcggttgtgcgctaaaatctgcacaccgtctatttgtattacttattggttcaactgataaataacttcactatgactgattcaatgcaacaaacacctaacgttggcgccttacggattagacgtggccatttcattcgaaccctgattaatcgcgataaaacgccgattgttattttggtcatggcgggcgtggttggtgtcattaccggtttgctcggcgtcgctttcgatcgtggcgtcgattgggtccaacagcaacgctttgcggcgatagggcaggttgcagattacgccattttggtgtggccgctggctttcatcctatctgcagtgttggcaatggtcggttactttttggttcgccgctttgccccagaagccggtggctctggcattcctgaaatcgaaggcgcgctggaggaaatgcgcccggttcgctggtggcgggtgattccggtaaaatttatcggtggtctgggtactttgggcgctggcatggtgctggggcgtgaagggccaatggtgcagatggggggcaacaccgggcgaatggtggtggatattttccgactccgtagcccggaagcgagacattctttattggcaaccggcgccgcagccgggttatccgccgcgtttaatgcaccgctggcggggattctgtttgttatcgaagagatgcgctctcagttccgctacagcctggtttcgattaaggcggtatttgtcggcgtgattatgtcgaccattgtttaccgctattttaacggtgaaaaggcgctgatagacgttggccgtctcggcgatgcgccgttgaataccctttggctgtatctgacactgggggttttgtttggtgcggtgggtgtagcgttcaatgctttggtattccgtactcaggatatgtttatgcgtttccacggcggagactggcgtaaactgctgatgattggcgggctactgggcggtatgtgcgggctgctgggggtcattcaagctgaaaccgtcggcggcggcttctcgctaattcctatcgcggcagcgggaaattacaccatcggtatgctgctgtttatctttatcgctcgaacgatcaccactttgttgtgtttcggctctggtgcgccgggcggcattttcgcaccgatgctagcattgggcaccatgttaggtaccgcctttggtctatcttgcggccactttttcccagaatataatattgaagcagggacttttgctatcgctggaatgggggcattatttgccgcatccgtccgtgcgcccctgaccggcatcgttttggtgttggaaatgaccgataactaccaacttattttaccgatgatagtgacctgtctgggggcgacgctaattgcccaatttatgggcggtaagccattgtattctgccattttagcccgtaccttacagcgtcaggaacaggcggcagaagcggcaaaagccagtgaaacggcggttgaaacaggtaaataaaatatatcatttaccgtgaatacttgaacccattactcaggtattagataattgccacatagatcaggctgccattgtagtgacctgcaactcgaacaccggttgggagtacagagtatgagcgacgaaacagtattgcccctgcagtttaccgaggcagcggcaaaaaaagtaaaactgctgatttcagatgaagaaaatccgaatatgaaactgcgggtctacattaccggcggtggttgtagcggattccagtacggttttacgttcgacgaccagatcaatgacggcgatatgaccattgaaaaagaaggggttgagctggtggttgacccaatgagcctgcaatatctggtggggggcgcggtggattacaccgaaggtctggaaggctcacgttttatcgtgactaacccgaatgccaaatcaacctgcggctgcggttcttcctttagtatctgatagttatcgcatcgatttattaatagcgaaaaaaaccgcctgcctttcggtaagcggtttttttatgtccgacgttcatcactttcgattagcgctctctcgatcaccactctaacgtaatcaattgaacaggaatctgcacatcgtttgtgacctcagcattccgcagtgttacagcgtcagaacgcgtaattttgggggcataactggcgtcttttgggcaattgacctgcgggtttggcccgtcaggggtatgattggtctctggtgaaatctggcatgctgcgtacagcttcaggctgacaaagatactgccattctgactttttgccagtccgggcatagcgaatagcgctagccaggaagtaaaaaaaagtcgtttcataaaaaatttatagttcgttggccatcttttcgttcagacggaaagcacattgagtatcaggtatcggtctgctgcgaagaaacttggtggctgaaatctgaatataacttaatcagtgctatgggtcgtgataataaaagcaggttaggcaaaatcgtcgtaatgaaaaagtaatatgtcatcacagtatatgtttaattatcatggtgtaaaaacctgaaaaaacaaagtgataaattaacctaaaacgctacgcggaatactattttttatgacatgcctgcatttatcagccaaagattatagcgcaatcgtaatattaaagccctatataaataagcgttgtaatgtaactttatctcaagtgataggaggatattatgaacatagctttaactattggtacacgttcggttttagttagtgaaagtcgccttgaacgaatgatttcacaagataaagaccatgcaacgcagctgggattatgggataaaatcatggattatttccgcccagaaaaaaaacaggatgcaatgaatgaactttacaggttaacccatgctcatggcacatctgccagcataactctacgagatagggtagagatttttaataaaataaaattgatgtctgagccagtatatagagatttatttagagtagaggaccacccgaataaagataatattactttttttattggcgagcaggatatatatagtcaagaccgtcactctctactactagaagagcaacagtttctttcatattttaatatgaataaaatcaataccgaccaggatttgaaaatagatttcattgcagcaataaaaagatatatttctggtgatttaagagtgcagtggaataatggtggagctaaacagatttttaaagatatatgcagaggaacatataatgtagacgggtttagaatgtccgttactgataccattagctcagaagtaaaagaagctcatctgaaaaaatttattaataaattaacggaaaaacaggaagaggttttcaatatcgtgggatcgcaaattgggcaaattgcgctgattgataccttattatcctctaaaaaacagtttttttttcttgggaatccggacaagcaagctgagtttcgctttgatgcagagagtggtgagattgaagtcagccatcttattcagcagaatgtaagtcatgaacattttatggtgttacgtgaacattactttcaagaaaacgcgcattggtatgatggacttagtcttaaagccacttttactattgcgggggatggatctgtcgattgcactaacttccatttttacagtaaagaatatgatggaaacactgatagtcatcgttctgagtaatcggtcgaatatgcgtttaaaagccactgtatttatgtgagttgatatggtcaaagtgggaagagtattttctgccctttatgagccggggcaggggtagatattcggaactttaagaccgttactgcaaatggaagtcgtccagcatcaacgggagttttcgcgtgttctcgttaatgctgggctgaatggatattaatctattcaatctcaaaggtgggcaacttcaagcgccagcgaatggcagccagccggatagccagcgtgatcgccatacccagcatcatagcctgttgcagcggcataccaaaagtatggtaggccgtggcatgcgcaatgccgccaataatacaggcggtggcgtagatttcggtgcgtagaatcatcggtatttcccgcgccaatacatcgcgaatgattcctccgcccacgccggtaatcacgcccatacaaatcgccaccagcggactggctccggcggcaaaggctttattcacgccgatgcccacaaacaccgccaatccaatggcatccagcactggtagaatccactttggcgtccggcgcggttggcgaaccagcaaaatagtcgccagacaggtgatcatcgctaccaccaggtcggtgggatcttttacccaaaaaaccgggccattagccagcgccatatcgcgaatggttccgcctccgacagcggtcaccacgcccaagaccaatacgccaaaagggtccatccgtagcttgcccgccaagagtacgccggatatggcaaataccgccgtacctaaaatatccagccagtagaccagcatttgagattactccgcgacaggggatgaaatgctggccagttgctggcacagctgttgagcggcgagcaggatacgcgggctggcgcgattaaaccagtcttcattgacggcaataaccgggatatcgagctgcggctgccagaaggcgcgaaccgacttgatttgctcatcgccaccggcgataacgatagcctttggctggcggttaagtacctgttcacggctgatttgcggccagggtacgcggctatcggcaaaaatattttcgccgccgcacaacgcgacgacttcactttgtaaggtatggccggacgtggtgaacagcggctgggtgccaaattgcagcaataccttcagaggctgattttttccataatgttttgccagctctgctctgcgtagccgaatttgctgcgctgcctgatgggctttttgcggttcagggctgtatcccgccagtttatccagatcgtcggcgatctgctcaatagtggtgggatcggaataaaaaatgggaatcccgaatgatgccaactggtcgagcggacgttgggcattaccgccgcgccaggccagaatcagatctggcttaagcgccagtattttttcaacattaatcccttgccaggaagccacgtgctccaactttttggccgcttcaggatagtcggagtaatcgctgacggcgaccagcttatctcccaaaccggcggcgtaggccagttcggttgtgctaggagccagactgatgatccgttcggctcccaaggcgggtatcgtcattcccaggatcaaaaagccgcagaatatggctctgcggcagaatgtcggtattgagcctgatttcatacttacgcgcgctgggacagcattttgagcatagcttcaatcatcagcgtcgattgctgagcggctaccaccaagaactcatcgaagctcagatgagattctttatcggcaacgtcagaaatcgcgcgcaccactacaaatgggatattgaaggcgtgacaaacgtggccgatagcggcggcttccatttctacggcagctacgctcgggaaggttttacggatacgagccaaaggctctgcgccattgataaaggcatcgccgctgcaaatcagaccgcgtacagcattaagattcaattgcctgatgcaggtttcagccagttcgattagggcgttatctgcggtaaaggccgcggggcaaccggccatttggccagcttcatagccaaaggcggtgacgtccgcgtcgtggtaacgcacttcttcggaaaccacaatgtcacccacgttcagcgaggccgccagaccgccagcagagccggtattaatgatgacgtcaggctggcaatgttccagcaataatgtggtgcccattgccgcagagactttaccgatgccggatttcagcagggcaacctctactccatacaactggccggtgtagatctcacagcctgcgcgtgacaatgtctggcggttttcgatcttgtcgcgtagcagagtaacctcttgttccatcgcgccaataattcctactttcattttgaatactcgctaatttttaaaaggggataaccatgtttttctctgtcagtaggttatcattgtagtgagctacaggtaatgtgcaatggcgttgcgtcgcaggtgaatgaagggtgctaccgaaggtgcaaccgtcagggggaatgatgtccgggatcgactttaagcagaaaatcagttttcagcgtccgtttagtcaaacgattaccgctgaagatgaatatgacattgtgcgccagtttgagagcgatcgcgggcgcatcgtcaattcggcagctattcggcgtttacagcaaaagacccaggtttttccgttagaacgtaatgcggcggttcgcagtcgcttaacccactcgctagaggttcagcaggttgggcggcacattgctaaagaaatactgaatcgctttaaacaagataaacggatcgacgaattaggtctggataagctactcgatccttttgaaagtattgtagaaatggcctgcctgatgcatgacatcggcaacccaccctttggacattttggcgaatctgcaatcaataattggttttcccgccgtatggatcccgctagctgcggatcagagccgcaaacgcaggatcgctgcgaggttagttttctgcgattgtcagaaggacagcaggaattgaaccggctgcgcagccgtattcgacaggatctcagccattttgaaggtaatgcccaagctatacgtttggtttataccttgctgaagctcaatctgacttacgcgcaggttggctgtattttgaaatatacccgcccggcctattggtctgcgcccttgcctcccagccacagctatttgatgaaaaagcccggtttctatctggcggaagaagactatgttgagcggctgaggcgagaattgaatatgggagaattcgatcgcttcccgctgacttatattatggaagctgccgatgatatttcttactgtattgccgatctggaagatgcggtagaaaagagcatctttaccgtggagcagctatttgaacatttgaagaacgaatggggtgaggtcgtacccggtgatttgtttgataaaataattgggaatgcggctcgtaagattgaacgagttcaagggcgaagaagttcagaagatcaattctttatgtatttacgggtatataccgtcggtaaattggttcctcacgccgctcaacgatttattgataacttatctagcgtatttaatggaacctttaatcaggcgttattagaggattcaagtccagcctgcaaattattacagattttcaaatctgtagcggcaaaacatgtatttaatcatccggaagttgagcaactggagctacaaggctaccgggttatcagtggtttactggatatctacagcccgttactctctatgccgcaggcggctttcgcgcagttggtcgcggaggacagtcatcgcgactatccaattgaaacccgcctgtaccataaactttcgatcaagcaccgtttagcctatgttgaggcgatagaaggtgtgagtcatttatccgccgagctgcgagagattagggaatattattatcgggctagattgcttcaggattacatcagcggtatgaccgatctttatgcctatgatgaatatcgtcgtttgatggcggcagaataagtttctgctgccgttctattatttaatctttattaggtcgagttttgtaaagacggtaaacaatttttactattacagattcagtattaatgaacttaggctctgacgactactcttactttgcatgactcgattagttagtcaaaactattaattaacttgttatttgtatatagagagaaagagaaccgacccatgaaaaaaactacgttagtgttaagcgcattggcattaagcattggtttcgccatggggccggtctctgccattgctgcagaaaccgcctcatccagcacccagcagctccctagtctggcaccgatgctagaaaaggtcatgccatcggtggtcagcatcaacgtggaaggcagtgctacggtaaaaagtgccgggatgccagaccagttccaacagttcttcggcggaaactcgccgttatgtcaggatggttcgcctttccagggttcaccgctgtgtcagggcgggctgggcggtggcgatggtcagccaactcagaaagaattccgaggattaggcgctggcgtagtgattgatgctgcgaaaggctatgtggtgaccaataaccacgtagtagaaaacgcgaataaaattcaggtgcagttgagcgatgggcgtaaattcgacgccaaagtgatcggtaaagatccacgcaccgatattgccttgatccagttgaaagactttaaaaatctaacggcgatcaaaatggccgattccgatcaactgcgggtgggcgactataccgtggcgatcggtaacccttatggattaggggaaacggcgacgtccggtatcgtttcggcgttagggcgcagtggcctgaacgttgaaaactacgaaaactttatccagaccgatgctgcaattaatcgtggtaactccggcggcgctctggtgaacctgaatggtgaactgatcgggattaacactgctattctggctccggacggtggcaatatcggtattggttttgctatcccaagtaatatggtgaaaaacctgacgtcgcaaatggtggagtttggccaggtgaaacgcggcgaactggggattatgggaaccgaactgaactccgaattggctaaagccatgaacgtggacgcgcagaaaggtgcctttatcagtcaggtattgccgaagtcttcagcggcaaaagccggtattaaagccggtgatgtgattgtgaccatgaacggaaaagccatctccagcttcgccgccttccgcgctgagattggcacactgccggtggggagcaaaatagtgctgggcctgctgcgggaaggtaaaccgattactgtcgatgtcacgttggagcagggttctcaggcgcagatcgcgtctggcaacatttacacagggattgaaggcgctgaactgagcaactttgatgccgcaggtaagaaaggcgtgaaggtagatagcgtgaaagaaggttctgccgccgcgcgtatcggcctgaaaaaaggcgatattattaccggtgtaaaccagaaaccgacgctaaatctcggtgagttacgtaaaattctcgaggctaagccttcagtgctggctttgagtattcatcgtggtgataccgatatttatctgttagcacagtaattatccgcgattcggggccagaatatttcggccccgaattttacctatccccgcttaattttcctttgattcaggcgacggcggttggcctatatggcttttcgcagcctgaatgacattctctatttcatcgagtaattccagccattctggcaataaatcctgattgtcagccttctgccgtagctgttgctcaatataggaacacagccgttttagtctcgggacgccgctgcacgcgcagctaccgtgcaatttatgaatcagattcacgatatcctcgtcgtctgcgccttccacaatggcgttgacccgctgtgtgacctgtgggagaaacgctaatagcatgaccaacagctcctgcgccaaatcttctttattggcggcctgacgaatagctagcggccagttaatcgaatcttcccagcctgcaggccgcggggtcattaccgtagcagacttctgaacggtcgtttgttcatgctggtaaaaacgcgccagcgcctgcgtcagccgggtttcatcaataggtttagccagataatcagccataccaagcttgagaaactgctcctgttggccactaatggcgtgggcggtaacggcaattattggcgtattaacatgattaggtaattgatgaattaactcactggcgcgaataccgtccacttccggcatctgaatatccatcaaaatcacgtccagagcatgttcgcgggcgacggcaatggctttttcagcgctttcacacagaatggtttcttcaacctgttcttccagcagtgtgcctatcagttttagattcgcaggattgtcatccaccgccattacacgcagcggcaggcgcggctttttcggttcgttttcgtttggcgcgggcaatgctcgcggatcttctttcaacaacagtggcatcaggcgattgctggaaatcggtttcaccagacaggctttggcacctaactgttttaactgctctgcatcaacctgagactggcttggcaacgccagaatcacatgatcggcaatttttagcgccgctaacagcttatcctgatgacctgccatattcgtgcggaaaggaatcggaacgccgactagcaggaaatcgtagtatttatccgggagttgggccagcgtcgggctgtgagtcacccgcagaggcgtaatgctcaacatatccaacgtggcctgagctgccgccggattccgttcgatataggctaaatgcttgccggcgagctgttccatggttggctggcgatagaccatgccttcgttgagatctaaagtgatatggaaacggaaagttgagccacgatttaactcgctacggaagctaatatcgccgtccatttctttgaccagacgctcggttattaccaagccaagcccggtaccaccgtggcggcgggaaatgctggcatcggcctggcggaaagcttgaaacagctgagactgctgctgttcggaaataccgatgccggtgtcctgaatctccaccgccagcttaatttgtcgggcggtttgcgatagcagacttacgtggatatctacgttaccattttcggtaaacttgatggcattgcccagcaggttggtcatgacctgctgcaagcgcatagagtcgcctaccacctgttctggcacatcattattgacgtgcagcgtcagttccagccctttctcatgtgcggtgtgagccagcaaaataacgacttcatccaaggtttcacgcagcgggaatggaatatgctccaacaccagcttttcggcctctagcttggagaaatccagtacgtcattgatgatacacagcagattattggccgagcgctggatggtttgcaggtaatctgtttgagttggcgtcagggaggttttcagcgtctggcgggtgaatccgattacgccattaagcggcgtgcgtaattcgtgggacatattggccagaaactcggatttaattcgcgccgcttcctgcgcccgtttcttcgccagacccagttccacgttctggatttccatctgttccagcgtttcccgcagatctgaagtggcctgatcgatattctgctgcatttcctcgtggtaggccgccagcgacatcgccatcgagttaatgccgtttttcaggatattcaattctcccagcatgtgtccttctacccgactatccaactggccgcgccgaatccggtctacggtattcaccatattacggatagggccggtcacatcgcgcatcagacgataggcaaacaaaatggcaatacacaggcagaacaacagcaataaagtagagataaacacttctttatattgctgaagtcgtacggattgtaaatctagatcgatggcaatataacccaacggacggttgctaatattggcttctggtggccggtcactggagatattatattccgagacaatgggcattcttaagattaacgaatcccctcggtaggtcagcatcaaagaactggggatcggaatattattcgtcaaccttaattgtgacgagttgtaattatagttagaagtgacaaaaagattattatctgcgtcaaaaacggtaattgaacgcacaatatttgaatggcggcgatgtaacagattaattaactgtctgacggtatctcgattacggaacgtcattccatattcactggcaaccgccagcggttcgataatactggttcctgcgttaactacttggttttgcagttcattatatcgatgcaccataaaagatgtactgagtaatagcccaagcagaagcgtgggagctaagattagtatcatcatgcgcgcgcgaagactgtatttggtcatggtattccaatgtgggagaattagcagcttacgaaaaccaacgcatactcatcaataattatggcgcaattctactctccaaaccgccgtgttacgacccggcaaatgataaccgtgactgctgacgacctggatcctttagggcagggcgttgcacattatcaaggtaaggccatttttgtccccggtatgctacccggagagcaggccgagatacagttaactgaagaaaaacgtcagttttcccgcggaaagcttcagcgtttactgaagccctgcgccgagagagtcgcccccctttgcccacattttgggacctgcggcggctgccagcagcaacatgccgatacccacttacagcagaacagcaaggcggctcacctgcaacgcctaattgcgcgagaaacaggcgtaaccgtagagccagagtctgtcatctgcgggactgaatacggttatcgacggcgagcgcgtttagggttgtactaccaacctaaacagcagcgtttggtcatgggttttcgcaaggtcgcttcccacgatttggtggcgataaaaacctgcccggtactgcgaccagagctcgagcgcctgttagcgccgctttatcgctgtttgtcagaattgcgtgccgttaaacgcctgggacacgtagaattggtgctggccgataatgggccgttgctgacgctacgtcatcttgatagcttgagtaccgccgatcgcgccgcgttactggctttttctcagcgtgagcaggtcgcgatttatctggctcccgacagcgatcatattgagcgtttaagcggcgaggagccttactatcagatagaaggtctacgcttagcgtttaatccgcgcgattttattcaggtcaatgccacggtaaatgagaaaatggtggcgcaggcgctggaatggttggatgtgcaaccgaatgagcgcgttttggatttattctgcggtatgggtaattttactttgccgttagcgcgtcatgccctacaagttgtgggtatagaaggagttgcgacactggtggctaatgggcaatataatgcgcagattaatggtttagctaatgtttcgttctttcatgagaatttagaggacgagatcgataaacagccttgggcgagccaaggttttgataaaatattgctggacccggcgcgggcaggtgcggccggggtcatgttacatatagtgaagctggcgccgaaacgggtggtatacgtgtcttgtaatcccaccaccttggcacgagatagccacgtgctgatcgacgccggttaccgtcttgcacgtgtgcgaatgttagatatgtttccgcacacggggcatcttgagtcaatggcgctgtttatacagcaggagccactggccgctgagtagggagaagttatggttgcggtaagaagtgcacatttgaatccagcgggcgagtttgctctcgacgattggatcgccagcttgggtcttcccaacccgcagtcatgtgagcgattagccgaaacctggcgttattgtgaacaacatacacaaggtcatcccgatgcctcgctactgctgtggcgcggccttgaaatggttgaaatcctttccaccctgagtatggataacgacagtatgcgcgcggcgctgctgttcccattggttgatgccaatgtggttaacgaagaaaccctgaccgaacagtttggcaaaggcattacctatctggtgcacggcgtgcgggatatggatgccattcgccagctaaaggccaccactaatgattcgatgagttcagagcaggtggataatgtccgccgtatgttactggcaatggtggaagatttccgctgtgtggtcattaaactggcggaacgtatcgctcatctacgggaagttaaagacgcaccggaagatgaacgcgtgctggcggccaaggaatgttccaatatctatgcgcctttggctaaccgcttgggtattggccagattaaatgggagctggaagatttctgtttccgttatctgcatcctgatgaatacaaacagatcgccaagttgcttcacgagcgccgcatcgatcgcgaacagtttatcgacgattttgtcgcttctttacgtcaggccatggccgatgaaggaatcaaagcggatatttatggccgccctaaacatatctacagtatctggcgcaaaatgcagaagaagtcgctggcgttcgatgagctgtttgacgttcgcgcggtgcgggtggtggttgagcgtttgcaggattgctatgccgcattaggtattgtgcatactcatttccgtcatttgccagatgaattcgacgactacgtagccaaccctaagcctaatggttatcagtcgatccacaccgtggtgcttggcccgcgtggaaaaacgctggagattcagattcgaacccgccagatgcatgaagatgcggaactgggtgtcgccgctcactggaaatacaaagaaggggcggttgcggcagggcgctcaggctacgaagggcgtattgcctggctgcgcaaactgatcgcgtggcaggaagaaatggccgattctggcgagatgttggatgaagttcgtagccaagtgttcgacgatcgggtgtatgtgtttacgccaaaaggcgatgtaattgatttgccagccggctctacgccgctggattttgcctatcatatccacagcgacgtgggtcaccgttgtatcggagccaagatcggcgggcgcattgtgccctttacctatcagctgcaaatgggcgatcagatcgaaattatcacccagaagcagccgaatccaagccgtgactggttgaacccgaacctcggttatgtcaccaccagccgcggtcgttccaaaattcataactggttccggaaacaggatcgcgataaaaatatcctggctggccgtcagatgctggacgacgaactggaacatatggatatcagcctgaaagaggccgaaaagctgctggttccacgctataacatgaattcgctggatgaagtgttagcggccattggtggcggtgatattcgtctcaatcagatggtgaacttcctgcaagggaagcttaacaaacctacggcggaagaagccgatctggaggcgttacgccatctgaccaacaaaacccagcagccgtcccgcaatagcagtaaagacagcggtcgcatcgtggtggaaggcgtcggtaatctgatgcatcacatcgcacgttgctgtcagccgattccgggtgatgaaatcgttggttttattactcaaggacgggggatttccattcaccgcgccgattgtgaacaactgctggatctgcaatctcacgcgccggaacgcattgttgatgcggtgtggggagaaagctattccagcgggtattcgctggtggttcgggtcacagccaacgatcgcagcggcttattacgggacatcaccacgattttggctaacgaaaaagtcaacgtattgggcgtcgccagccgtagtgataccaaaaagatgctggctaccatcgatatggatattgaaatctataacttacaggtattaggtcgggtgttagctaagctcaatcagttgccggatgtgatcgatgcccgccgcttgcacggcaattaaattaacgaggatatccgcgagtgggcgatctgggctaggctttgcccttttagctctgaccagtgttcgacttttgagccgagcgctggttaacatcaattctactgcgcacattacatcttgattatcataaataaaagtgaaaaaaccgctatgacgcctactgaaaccgccgctgattccaccgcttcggccttacaacgtctgttggatatcatgcgcgcgttgcgtgacccggaaaacggctgcccgtgggaccgtaagcagactttcgataccatcgcgccttacacgctggaagaaacctacgaggtgcttgacgcgattcagcggcaggattatcccgacctgcgtgatgaactgggcgatttgctgttccaggtggttttttatgcccaaatggggcaagaacaggggttatttgccttcgatgatatttgcaacgccatcagcgacaaactggtgcgccgccatcctcacgttttccctgtttcgggtcaatcggccgaggtgatggatagcgcagaaattattgccggttgggagcaacgcaaagccggggaacgggctgataaggcgctgtactcggcgttggatgatattccagacgctttaccggcgttgatgaaggcgcataaaatccagaaacgctgtgccgccgttggttttgattgggatacgcttggcccggtgctggacaaagtatacgaagaaatcgacgaagtgatgtttgaagcgaaacaggcggtggtggacgaggagaaactgggagaggaaatcggcgatttgctatttgcgacggtgaatctgtcccgccatttgggccataaagccgaaaatgctttgcaggcggcaaaccgtaaattcgagcgacgctttcgtcaggtagaacagatagttaccgcctctggccgcaagatggaagatgcctctttagccgaaatggaagccgcatggcagcaggttaaaaagcaagaaactgaaatctaacgtgttttaattcatttgatggatggttgttgaatttcaattacgttaatatattgaattataacggataggaagacggtgttcagcgcgcttttcatgagtaaaactctgcgaggcgttgagatcatttgtagcgaaaccaaggttcgagtatactactttcccgtcttggttcttccatcgtctttaaacctaaactctcaggttcagcatgacaactaattatatttttgtgaccggcggggtcgtatcctctctgggtaaaggcattgccgcagcctccttggcggctattcttgaagcccgtggcctcaacgttaccatcatgaaactggacccgtatatcaacgtggatccgggcaccatgagcccgacacaacacggggaagttttcgtcaccgaagatggtgctgaaaccgatctggatttagggcactacgagcgcttcattcgcaccaaaatgacccgccgcaataacttcaccactggccgcatttactcagaagtgctgcgtaaagagcgtcgtggcgattatctgggtgcaactatccaggttattcctcatattaccaacgctatcaaagaacgtatcatcgaaggcggcgaaggccacgacgtggtattggtcgaaattggtggcaccgtaggtgatattgaatctctgccgttcttggaagcgattcgtcagatggcggtagatgttggccgcgagcatactttgtatatgcacctgacgctggttccttacctggctgcggctggcgaagtgaaaactaagccaacacaacattcggttaaagagctgctttccatcggtattcagcctgatgtgctgatttgtcgttccgatcgcgcagttcctgctaacgaacgggcgaaaatcgctctgttctgtaacgtgccagaaaaagctgttatctctcttaaagacgttgattccatttataaaatcccaggcctcttgaaatcacagggccttgacgattatatttgtaaacgattcagcttaacttgtcctgaagcaaatcttgccgagtgggaacaggtaatatatgaagagtccaatccgggtggcgaagtgaccatcgggatgatcggcaaatacgttgagctgccggatgcctacaaatccgtgatcgaagccttgaaacacggcgggttgaaaaaccgtctgaccgttaacatcaagctgatcgattcacaggacgtagaaacccgcggcgaagaaatgctgaaagggctggatgctattctaatcccaggtggcttcggctatcgcggtgtagaaggcaaggtgactgcggcgcgttatgcccgtgaacacaatattccttacctgggcatttgcctgggtatgcaagttgcactgatggagtttgcccgtaatgtcgcgggtatgcagaacgccaactccacggaatttgtgccagactgtaagtacccggtggttgcattgatcaccgaatggcgtgatgaagacggcaacgttgaagtacgtacggaagaaagcgatttgggcggtaccatgcgtgtgggtgggcagcaatgcaaccttaccgatggtagcctggtacgtcagatgtatggcgaacccaccatcgttgaacgccatcgtcatcgctatgaagtaaacaacatgttgttgaagcagattgaagctgccggtctacgcgtagccgggcgctctgctgataacaagctggtggaaatcatcgagttgcctaaccatccttggtttgtcgcttgtcagttccatccagaatttacttcgacgccacgtgatggtcacccgttgttcgccggctttgtgaaagcggctggtgagtatcagaagcgccaggtgaaataaaatatttggtaggtggggcggcttgaatgtcgccccatctgtctggagttttagtttaacttgtactgaggaaaatctaatgtccaaaatcgttaaagtcatcggtcgcgaaatcatcgactcccgtggtaacccaactgtagaagctgaagtccatctggaaggcggtttcgttggtttggctgctgcaccatcaggtgcttctaccggttcccgtgaagcactggaactgcgtgacggtgacaagtcccgtttcctgggcaaaggcgttctgaaagctgttgccgctgttaatggcccgattgctcaggctgttatcggtaaagatgccaaagaccaggctaacatcgataaaatcatgatcgatctggacggtaccgaaaacaaatcgaaattcggtgcaaacgcaattctggctgtttctctggctgctgccaaagcggctgctgcgtctaaaggcatgcctttgtacgagcacatcgctgaactgaacggcaccccaggccaattctctatgccactgcctatgatgaatatcatcaacggcggcgagcacgcagacaacaacgttgatattcaagagtttatgattcagcctgttggcgctaaaactctgaaagaagcggttcgtatcggttctgaagtgttccacaacctggctaaagttctgaaagctaaaggtctgaacactgctgttggtgacgaaggtggctacgcgccaaacctggaatccaacgctgctgcactggctgcaatcaaagaagccgtagaacaagcgggttacgtgctgggtaaagacattactctggctatggactgtgcagcttctgagttctacaacaaagaaaccggtatgtatgagctgaaaggcgaaggcaaaaccttcacttctcaagagttcactcattacctggaaggtctggctaaacaatatccaatcgtttctatcgaagacggtctggacgagtctgactgggatggtttcaaataccagaccgaagtgctgggcgacaaactgcaactggttggtgatgacctgttcgtaaccaacaccaagatcctgaaagaaggtatcgaaaaaggtgttgctaactctatcctgatcaaattcaaccagatcggttctctgaccgaaactctggctgcaatcaagatggcgaaagacgcaggctacaccgcggtgatctctcaccgttctggtgaaaccgaagatgcaaccatcgcagatctggctgttggtaccgctgccggtcaaatcaaaacgggttctatgagccgttctgaccgcgttgctaaatacaaccaactgatccgtatcgaagaagcgctgggcgaccgcgcagtattcaacggtctgaaagaagttaaaggtcagtaatttctgccctgatacttaccagaaaaaacccgcttcggcgggtttttttatatctaaagttaatgaaatagaaactattattttttatttatatggttatacagggaataaatgagatctatcggtgattaattgaattgaaacctgttattcaattcaaaattaacatttcaacaagtcatatcaatttatatcttaattaaggttgtttttttatataaaaacaaaataagctggttcataatctgctttgaatactacactgaagtataaatatagtaataatattattactatttggtttgactagccggatcgctaaatatttaactgctgattacgctttttctaaaagccattattacctgtttgaggttctgtatccatgaaatatagagttgttatcgtcggtggtggtaccggggagacaatccttgcgattttgttggcaggtaaactgcaaagggatattgtttcaaagaaagtcgaacttatcttactgtctgattctctcatgcattattataaacctgcgtttatgtatgtagcatttaatttatttcttaaacaggaattagagagaccacaaaaaatcctattgagaccagaaatagtatttattatagataggtccgaagggtttgatttaaataaattatctttacccgcaaaggtgaaaaatacggttatgattttttagtttttgcgtccggctgcgtacctcgacttgaatgaatagaggggttggtagaaagtggcgatcatttttatccgtatgaagcgtccggcctgttagctaaaaagctagccaaaatagaaaagggcgaatttttatcatcgtctctttcccagagacatctaacgttcaccacccgtgcggagttgctccactagaaatgacgttaatgccagatgactatttacgacagcggggagcgggtagtgcgatagaaattatttatacctatccgagggtagcgcagctattgcgtaactgtctctttttacagcgtcctagcggagatattttacctaacgtctttgctgccagagatattaaatatcagagaggcttcacactgagcaaagtcgatccgaataaaaaattgcctattccgcagaaggcgaggctcaacccttcgatattttgatggcgactccacctattagcgctgttgatgcggtgcgaaattcggggctgagtgaatgggataacaaaggaggcgggttgccaaccgacccacaaacgctccaggtttatgggcagcagggcgtttatgttatcggtgataccgtttctccctatccgtaaagcgggtggtgcctgccataaccaggctcctatagttgcagataatagttgcagataatattttttccgaaatgatattgggttatcccgcgcgtgactacgataggaaagtacaggctatcgcccaaatggggctgaatgccggaatgccgctttgttatggctatcggaatgatctcttgcccaggctaccgacaaaggtaggcgtttgctacgcagcggctttaaccgcggtctttattgggcaatggtgcgtggcttaatataaatattaggagaaatactcgcgccaaagcgcgaaaccttgagatatatgctctgtgaaggcaaagttatcaatgataaattcgggctctcatgagggtgggtttttataatgatgagctgatatagcgatgaattctataataaaggattttacaacaaagagtttttataacaaaaagtcgttgggttctagcatattgattccgtttatctctcatggtgatattttctatgaactcttgcctgccagtaaatggcgttgcttaagagtttggctaatcagaatcaataagtatttaatcactatcaatcaatattaaggaaaagaaagatatgaagctaagcaccttcttgttaccccttatattttgctctggcgcagctttggcagcggatttgaccgtgactatgaatgaatcattaccgcagggaaatggccgggcgcttggcaagatagtcgtaacggaaacgccctatggactgctatttagccctcagttagctggattgacaccgggcattcatggtttccacctgcatgaaaatgccagttgcgcgtccgcagaaaaggacggaaaaatggtacccgcgttagcggcgggcgggcatttcgatccgaaaaaaacttcagcgcatctggggccttatagtgataaaggacatttgggggatttgcctggattggtcgttaacgccgatggttcagccaactatcaagtcttggctccacgcctaaaatccttatcggaacttaaacatcacgccctaatgattcatgccggcggcgataactatgccgatcatcctatgccgttgggcggtggcggagcgagaatggcctgcggtgtgattgagtaaccccctgatacaaagaaagctggccgccagcaggcggtcggtttggtgacagcgtcagaatctgcgataatcccccattacccgctttcatatagagatactgatgctgtacccgattaatgagatgttccagactttgcaaggtgagggctttttcaccggcgtaccggcgatatttgtccgtttacaaggctgcccggtagggtgcagctggtgtgacaccaaacatacctgggagaaaaacgtcgatcgggaagtcgatgtgcagcgtattttggtgaaaaccgaggaaagcgacgcttggggcaacgccagcgaacaacagttattaacccttcttcgccaacaaggctatacggcgcgccacgtggtaattaccggcggtgaaccttgtatttacgatttattgccgctaaccactctgctagagcaggaaggctttagctgtcagatcgaaaccagtggcacttatgaagtccaatgctcggaaaaaacctgggttaccgtttcacctaaagtgaatatgcgcggcgggttaaaagtattagaacaggctttaactcgggcagatgaagtgaagcacccggttgggcgaatgagagatattgaagcgttggaggcattattggccacgttgcacgataataaacaacgaattatcgcgctacagccgatcagtcagaaagaagaggccacgcgactttgtattgaaacctgtatcgcccgcaattggcgattatctatgcagacccacaaatatttaaatattgcctgatagtgagaggcgcagggctgagggatgctctccagccctgacctagccagattaaccgcggtagacgcagcctgcggagcaggtttcttttaccatgactgcgctcagctccggtaattgcggtttcaactgctgccaaatccaagccgctaaaacttcactggttgggttctccaaaccggggatatcgtttagataatgatgatccaaacgctcccaaataggctgaaaagctgctttcagctcggcgaaatccataacccaaccgctatgagcatcaacttccccggtcacttccaggcgaaccataaatgaatggccgtgcaaacgaccacatttgtggccttctgccacgttaggtaaccggtgtgcggcttcaaactgaaaatctttaaataatgtggtgctcatcatcctggccttattgactcaaaaaccgccgcatagtaccggaaactgggcgcgcaagctacgtttgccggtcttggtgcgccatccgatttactataataactataatttagcagcctatgcttttgatttaaaaccttccgcttggtcgattattggattttcggatcacagaaatttttcctaataagttgaacactttgactcgtatgtcatagcgaaaaaaccgcttagttgttttagttattaattatttctatcacttctttaattgttattatccggatggttaaccttacaaacctaaagatttatttgccgacaagatatcggactgacactggctaaagcacaagggaattcgtaccgcgatgacgactcaggctcctccaacttcattactcccgctttcgccggagcaactggcccgcttacaggcggcggtcggcgagttttcgccaacgcaaatggcgtggctgtccgggtatttttggggcatggtcaatcaacagccgaacgtgcctgctcatggggttgcagagccggaaacgccgtgtattactctgatttctgcgtctcaaaccggtaatgcgcgtcgtttggccgaacagttgcgtgacgatctgttggcagcaaaactaaaggttaatctggttaatgcgggcgactacaagtttaaacagattgctcaggagcgcctgttagtcattgtcgcctcgactcaaggagaaggtgagcccgcggaagaagcggtagcgctgcacaaatttctgctatccaaaaaggcgcctaaactgacggaaaccgcgtttgcggtctttggattgggcgatacctcttacgagtatttctgcaaggcgggtaaggattttgatacgcgtctggccgaattaggcgcagaacgtttgttggaacgtgtggatgccgatgtggaatatcaggcgcaggctgaacagtggcggcagcaggtggtgactgttttacaagctcgcgctccggcacaatctgccagcgcagcggcgcagacgctaagcggtgctgtggatgaaatgaccagcagcccgtatagcaaaactacgccacttaccgcacagttggcgatgaaccagaaaatcaccgggcgagattcggaaaaagacgtacgccatatagaaatagatttaggtgaatccggtttgcgctaccagccgggggacgcactgggcgtgtggtatgaaaacgatccggcgttggtggacgagctagtcgagttactgtggctaaaaggcgatgagccggtcacggtggaggggcaaactttgccactgccactggcgcaggcgctgcgcttgcactttgaactgacgcaaaataccacggtgattgttgataaatatgccgcgctttctcgcgatgagaaactgattgctctgttggcggataaaagcaagttacagcattacgctcatagcacgccgatcgtcgatatggtgcgtcaggcaccggcggatctgaacgccgatcagctgattgctttgttacgtccactcaccccacgtttgtattccatagcttcatctcaggcggaaaatgaaaccgaagtgcatatcaccgttggagtcgtgcgctatgacatcgatggtcgtccacgcagcggcggtgcgtctggcttcctggccgatcgcttggaaatcgatggcgatattcgggtctttatcgaacataacgataatttccgtttgcccgctaacccagaaacgccagtcattatgattgggccgggcaccggtatcgcgcctttccgcgcatttatgcaacagcgcgatgccgaaggtgccagtgggaaaaactggttgttctttggcaatccacactttaccgatgattttctctatcaggtcgagtggcagcgttatgtcaaagaaggtttgcttacccatatcgatctggcctggtcgcgggatcaatcggaaaaaatatacgtacaagacaaactgcgcgaaaaaggtgcagaactgtggcgctggatacaacaaggtgctcatatttacgtctgcggcgatgccaatcgcatggctaaagacgtcgagaaaactttactggacgtggtggctgagcacggtgcgatggatgccgagcaagctgacgaatttttaagtgagctgcgctttgcgcgccgttatcagcgagatgtgtactgatgaatgataaacaccctggaccattggttgtgactggtcaattgtctgacggcgagcggatgaaatcccagagcaattacctgcgtggcactattgccgaggatttacataacggtctgaccggtggtttttccggcgataacttcctgttaattcgttttcatggaatgtatcagcaggatgatcgtgatattcgcgctgagcgagcggagcaaaaattggaacctcgccatgccatgatgctacgttgccgcctgccgggggggattatcacgccacagcaatggctgggcattgataaattcgcgacggacaacacgctgtacggcagcattcgtattaccaaccgtcagacttttcagtttcacggtattctgaaaggaaacgttaaaccggctcatcagctattgaatcagttaggtttagatgcattggcgacggccaacgatgtaaaccgcaacgtactctgtacctctaatccggtagagtctgaactgcatcaggaggcctacgagtgggcgaaaaggatttccgagcatttattgccacgtactcgagcctacgccgagatttggctggatgcggagaaagtggcaaccaccgatgaagagccgattctgggtgcaacttatttgccgagaaaatttaaaaccacggtagttattcctccgcaaaatgatgttgatttgcatgctaacgatttgaacttcgttgcggtggcggataaaggtaaattaatcggttttaacgtgttggttggtggcggactgtccattgcgcacggtgataaaaatacttacccacgtaaagccagcgattttggttttatcccgttggcgcacacgctggcggtagctgaagccgtggtaaccacccagcgggattgggggaatcgtaccgatcgtaaaaatgcgaaaaccaaatatacgctagagcgcgtcggcgtggatgtgtttaaggcagaagtggaaaaacgcgctggaattagctttgcaccgaccaaaccctatgaatttacgggtcggggcgatcgcatcggctgggtgaaaggcattgataaaaagtggcatttgacgctgtttattgagaatggtcgcctgctggattatccagatcgtagcctgaaaaccggcgtggctgagatcgctaaaattcatcagggagattttcgcttaaccgctaatcaaaacctgattgtagcgggcgtaccggagaaagaaaaagatcgcattgaggcgctggcacgtcagcatgggctgatggatagcaacgttagccgccaacgagaaaactcgatggcctgcgtttcattccctacctgtccgttggcgatggcggaagcagaacgtttcatgccggagtttgtcacgaaaattgaaggcattctgcacaaacatcatttatctgatgaatatatcgtgatgcgcgtcaccggctgcccaaatggttgcggtcgcgctctactggcagaaatcggattagtgggtaaagcggtaggccgctataacctgcatttgggcggcaatcgtgaaggtacgcgtattccgcgcatgtatcgtgaaaacattaccgccgatgagattctggcaattaccgatgaattagttggccgttgggccaaagagcgtgataccaacgaaggcttcggggattttattattcgcgctggtgtaataaagccggttattgattcagcccgtgacttttacgaatggcagggggcggtgtgagccagtttaatctcaatgaattaaatgccttacccaaggccgagcaggcagcggcactcgcgctggttaacggtcagttggaagtgctttccgcacaggaccgcgtgagttgggcattggagaatttaccgggtgaatacgttttgtcatccagttttggtattcaagcggcggtatgcctgcatttggtgacgcgccagcggccagatattccggttattctgacggacacaggctacctgtttcccgaaacctatcggtttattgacgaattagccgagaaactgcagctcaatctgcaggtatttcgtgctgaacacagcccagcgtggcaggaagcgcgctatggcaaactgtgggagcagggcgtagaaggtattgagcgttacaatgagttgaataaagtggagccgatgaatcgcgcgttggaaacgctgggagcgcaaacctggtttgcaggcctacggcgcgagcagtcaggcagtcgggccaaattaccggtattggccttacagcgtggagtattcaagctactgccgattatcgactgggataatcgccgtatttatcaatatctgaccgagcatggcctgaattaccacccgttatgggaacagggctatttatccgttggagatactcatacaacccgtaaatgggaacccggcatgagtgaagaagaaacgcgctttttcggtttgaaacgggaatgcgggcttcacgaaagctagaaccagctttttcctctgcaatcgcattgggagccttggtgctcccaatgtcttggtggctaaccagttaaatgcaatggttagcagcgtagcctattaaaatataacgtcattttttcattaacattttcgtcgacgttcgttacagacgattattcactctgcttatctaattaaccgctgattttctctctggctaacgctgccagaaagtggctgcgatttttatagttatggctgatttaataaatctatcgattgtcgtcagcaaattttgcggcatggtcaaattgaactataccgctttgctttcgtattgtgtcggctcgatttcgatgaaacctaatacgtcgccgctctaggttaaacgcgaatctttaatatagcgctgcggatttttggggggtgtaggtaagggaaagccatcatccatcaaggcttcaacttgaattgcaaaggttttttccgcgttggcggttgtcatacccctaaacagcctttccttagatggtatacccagaacgaatttatacgcggggaatacaaaaagggcgctcataatgagcaccccgttggtacttatcggactttttaatcagattgcgaatgacttcccactaaaatgattatttatttgctccggctagctcttttaccagcggcagcaggattttgacgctatcccgcgaacgtttggcaatcctgccgggcaagtgatgatcgagataattcagattatcccactgactctggtggcgggtttcccccaatggaaaatgggggctgatagcacgttgttggcaaccgtcttttttgcctaactgatagttggtggcttcgacggaaagcactgaaatgcccgatttatcaaaggcattctgatcggcgcgacagtgaggctctggcgtgttttccgggcgactcgccgctgggattccggcattgcgcgctaacgtcagggcgcgatcgcggcttttcgctgcgaagcttttagcatcatgctggccggggttgaaatacaaacgatcgccggtaatcaaactgtctaaggtgatgaccagcaaggtgttttctttttcctctgcgctcatgcgtttcagatagtttgctgcaccctgagcgccgacttcttcagcgcttaaagcgacaaaacgcaagctataacgggtcggaatgtctttcaaccgctccgccagttcaagcatcacaccgacgccagaggcattgtcatccacgccttgcagcgtcaggccgcctaggtttttatccaaatcctgatcgctatgaggcgtgtaagtatcaaagtgggccatgatcaccacttgctgcggctcgcgaccaccgtgggcggcaatgaccgaagtggcactgaggttgcgccaactctgcttgccgtttttactggtgtaaagatagcgggtattgaaaacccgcaaattggtctggtaacccatggtttcaaattgctggttaagataatcggcggcgagcaattcggcagggctaccggccatacgtccagggaagtaggtggcaatatggcgagtttgttgctcggctattttccctaacggctcacttttagccgctgcggccgccgcattcagtgggaatacagtgctaaaacaaagcgtaacaatcgccagtttcaggtgaaggcgggaaaacatacctaaatatccttttatagagtcgtaatcgcgcagtttggcatggataacgctgcgctatgcggggcttagtatgagactgtccgcgcgattagacaatttgtatggttcctaattatcagaattttttatgtctaaatcaggaatgtcattcgacgctataagtgagcttgcctctgcaaggccgattgcatcggctttatatcattacggaacttgtaattacttttcgtcatttcataaggtcataccccgcccctatagtcaccttacgctttatcatgtaatcgaaggccgctgtggattatctaccaatatttgccgacttgaaacaacgcccggttctggtcgttggcggcggcgaaatcgctgcgcgaaaaatagatttgcttcatcgcgcgggcgctcagatccgggtagtggcgcaggcgctttcttccgaacttcagcaacagcatgacgcgggaaaaatttgctgggtggcagatatttttgcgccagaacagctggacgaggtttttctggtgattgccgccactaatgacaacgctttgaatgcggcggtattcgctgctgcggatcagcggcggattctggctaatgtggtggacgatcagccgcgttgttcgtttatttttccttctattgtcgatcgttctccgttggtggtggctatttcatccagcggtcaggcgccggttctggcacgaatactacgcgaacagctggaagccctgctgcccgcgagtctgggtgacatggctgccgtggcgggtcgctggcgtgcgagagttaaacagcggctcacgtcgatgagcgctcgtcgtcgtttttgggaaaaggcttttaccggtcggtttgccagcctgatggccagtggacaatcgacgctggcagaaagtgagctggagctctccctgatagagccgcaaagggaaagcggcgaagtggcgttggttggcgcaggcccaggtgatgcgggtttactcaccttacgtggtctgcaggttattcagcaggcggatgtcgtgctatatgaccatttagtcagccccgaagtgctggacttagttcggcgcgatgcggatcgcatttgcgtgggtaaacgggcgggcgctcactccgtagcgcaggaggaaaccaatcgcttgctggtggaactcgctcagcagggcaaacgggttgtgcgtttgaaaggcggcgatccctttatttttggccgcgggggcgaagaacttcaggtagtcgccgccgccggtattccgtttcaggttgtaccgggagtaacggccgccgccggagcaacggcttatgcggggattccgttaacccatagggatcacgcccaaagtgtcacttttattaccggtcattgtcgggtagacggtgacgggctggattggtcaacgctggcgcgtgggcgtcagactttggctatttatatgggaacggtcaaagcagctgaaatcagtcagcaattgatcgcacacggtcggtcggcgcagacgccggtagcggttattggccgtggaacccgcgctgaccaacaggtattgattggcacgttggatcaactggacacattagcgcatcaggctccggcgccagcattgttggtgattggagaagtggtggatttacaccaccagatagcctggtttgggcaacaaccgcagactgaacggccgcttaggtcgtcaatcgtgaatttggcataaaggatctgttatggacgaaaaacgactcactcacttgcggcaattggaggcggagagcatccatatcatccgtgaagtggccgccgaattcgggaatccggtgatgctttattccatcggtaaagattcctcggtgatgttgcatctggcgcgcaaagccttcttccccggtaatttgcctttcccactgctacatgtcgataccggctggaaattccgcgagatgtatgaatttcgcgatcgcaccgccaaagattttggctgcgagttgttggtgcataaaaacccggaaggggtggcgatggggataaatccctttgttcacggcagtgccaagcacaccgacatgatgaaaaccgaagggttaaagcaggctcttaaccaatatggctttgatgccgctttcggcggggcgcgccgtgacgaggagaaatcccgagctaaagagcgtatttattcgttccgcgaccgtttccatcgctgggaccctaaaaaccagcgccctgagctgtggcataactataacggccagattaataagggtgaaagcattcgcgttttcccactatccaactggactgaactggatatctggcagtatatctttttggaaaacatcgacattgtgccactgtatctggcgaagcctcgcccggttatcgagcgggatggcatgttgctgatggtggatgacgatcgtatcgatctgcaaccgggtgaaatgatcgcgcagaaaatggtgcgcttccgcacgttgggctgctggccgttgaccggtgcggtggaatcgcaggcggaaacattgccggcgattattgaagaaatgttgatatcaactaccagcgaacgtcagggtcgaatgatcgaccgcgatcaatccggctccatggagcttaaaaagcgtcagggatatttctaaggagcggcccgatgagcaacatgattctacaaaatacggcgatggcacaacaaattgccgatgaaggcggcgtagaggcctatttgcacgcgcagcagcataaaactctactgcgtttcctgacctgcggcagcgtggacgacgggaaaagtaccctgataggtcgtttgctacacgatactcgtcagatttatgaagaccaattaacgacgctgcataccgatagcaagcgcattggtacgcagggtgaaaaactggatctggcgctgctggttgatggtttacaggccgaacgggagcagggcattactattgatgtggcttaccgctatttctcgacggaaaaacggaagtttattatcgcggatacgccggggcatgagcagtacacccgtaatatggcgaccggcgcatcaacctgcaatctggcgattttgctgatcgatgcgcgtaaaggcgtattggatcaaactcgtcgtcacagttttatcgccactctgttggggatccgtcatttggtggtggcggtgaataaaatggatttggtggattatcagcagtcggttttcgagcaattcaaaaacgattacctgagttttgccgaacaattgccgacggatctgaatatcaaatttgttccgctgtcagcattggacggcgataacgtagcgacgccaagtgagaaaatggcctggtacaccggccccacgctgctggacgtattagaaaccgtggatgtggtgaacgccagtcgccagcagcctctgcgttttccggtgcagtatgtgaatcgccctaatctggattttcgcggttattccggcaccttgtccgccggtgtggtgcgcgtgggtcagaaaatcaaagtgttgccttctggagttgaatccacagtagccagaattgtgactttcgatggcgatttgcagcagggcattcccggcgaagctatcacactggttttggctgacgaagtggatattagccgtggcgatttactggtggatgccgatgaaacgctaaaaccggcgcagaatgcgctggtagacgtggtctggatggcggagcagcctctggtggtcgggcaaagttacgacatcaaagtggcgggcaaaaaaacgcgtgctcgggtggagaatattcagtatcaggtggaaattaacagcctgactcagcgagtggtagaaagtctgcctctaaacgggatagggctggttgaactggcctttgacgaaccgttggtgttggatagctatcagcgcaaccgcgataccgggggaatgatatttatcgatcggttgagtaacgtcacggttggcgcagggctgattcgggaaacgctggagtcggtttatcaggaaaccagtcagtttagcgcttttgagctggaattaaatgctctggtacgtcgccactaccctcactggggtgcgcgcgatctattgggaggaaagtagtttgcctgctcattctttgcattctgataaccagcacactttgcctgcggatgtgccagcggatgagaatgtcgtctggcattcccatgcggtaacccggcaggatcgcgaaaggaaaaatggtcaccgaggcgcggtgctgtggtttaccggtttatccggttcgggtaaatcgacgttggctggtgcgctggaacaggagttgttccggcgtgggatccgcacctatttattggacggcgataatgttcgtcatgggttatgtcgggatttaggtttttccgataccgatcgacgggaaaacattcggcgtgttggtgaagtggcaaagctgatggttgacgctgggctggtggtcttgtccgcctttatttcgcctcatcgcgcagaacggcaaatggtgcaggaaatgttagacaacggccagttcatcgaggtttttgtcgatacgcctcttgccatttgtgaggctcgcgatccaaaagggttatacaaaaaggctcgcgccggtgagctgaaaaactttaccggaatagattcagtttatgaatctccaatggcacctgatattcatctgaaaggagatcggcctttggcgcagttagttgagcaattactggaacaactttcggtaaaagccattatcagctaagcaacgaaggtttattggcaggaaaggggcgactttgcaggccccttttatcaatctttttatcgcctgttacccccggattaggcagaaacgctaagcagctcgcttttcatcatggcattcaggtgacgcaggatttcatcctcggagaaatgaagctccggaaattgtgtcattccatccagaccgcacaccagacctattaatcgccaggcaatattgccgctgtcatcacccgaacgaaactcaccgctctctcggccgctattaatgacggctaccgtggcttgatgccaattggacatcgattgggtataggcgagccggatggcatcgtcgcgctcggccagcagactcacctcattccacagccgggtttctctttttcccgcgtcatcttgcggataacccagcaccagcagcaagcgctcaaccgccggatgattttggcaggctatagcaaaggtggcgagtgattgctgaaccagcagcaggaaagcatcggctcgcagttgagagacagacgcaaaatggtggtgaacctgacctaccgccacctcggcttcatttgctacgcggcgcaccgtggtagcggccattccttctgccatggccacccgcacggcagcattcaaaatactgctatgccgctcttcgcgattcaaatatgccaaggatgctcctttgctctcattctgagatgaattaacagtttggtatgtaggggaattatgcagagaattggactgatgttcaacatttcgctacaatcgcatattgaacgcgtgttcaacattaaattctgccttatttgagtctctcattatgtctaagaaatggactattttttgcgttatcattttgatgtacctcccgatttctattgatgccaccgtcttgcatgtggctgcgcctcgccttggattggctttgtcggcaacggggagtgaattgctgtggattatcgatatctattctttggtgatggcttgtttgctgttacctatgggggctttgggcgaccgcatcggttttaaacggctggctctgattggctccgtgctatttggactatcgtcgctggccgctgccttggccgattcggtgggaacgctgatcgctgctcgcgcctctttggctattggggccgccatgattctgcccgccactttatctgcggttcggcatattttcaccgatgagcgcgagcgagcgctggcattgggaatctgggtggcggtaggtaccgctggtgccgctatgggaccattagtgggcggagtgctgctggaatacttctattggggctcggtctttatgattaacgtgccgatagtcgcggtggtggtattggcgacctgtttcctgatcccagaccagcctggtcgcagaacgcaaagctggacgttggcaccggccttggtattgaccacggcaatattattactggtttatgcggctaaaagcgggctgcgcggcaatggcgatttactcggcacctcgctaaccgcagcgattggtggcgttatcctgtacggttttatccggcatcagctttcatcaccttcgccgatgattgattttcgactgattggtcagagggtgattgccgtcggtatgattatggcgctgaccgcgatgatcaccttggttggtttcgaattgttactgacgcaggaactgcaatttgtattagggaaaacgccgctcgaagccggtcttttcctgttgccgctgatgattgcaagtggcctaagcggccctctggccggttggctggtggcaacgttaggtttgcgtttagtcgccactctgggcatagccttaagtgccgttagcttctttggattggcaatgacggatttctcctaccaaatctatcaggcgtggggctggatggcgttgctcggttgcagtattgaaatctcgttgctggcttctactgccgctatcatgagcgctgcgccgccggaaaaagccggtgccgccggagcggttgaaggcatggcatatgagctgggcgcgggtttaggcgtcgcgctatttggtcttttgttatcgcggttgtatatggcttcggtggtattgccggaagatttgcctgcgaatctggcagagcaggccagcgcttctattagcgaagcgatgcaggttatcagcgaactgggtggggagcagggcgagcgaatgtttgccagcgccagtcaggcattttcgacctcgcatagtctggtattaagcatcgctagcggcatcttgattttactcaccgcagtggtctggtacagcatgccgagaaaagaatccgaggctaaattgataaatatatcaaaacactaatgatagaaagaggcgaagatatcgcctctttttttgcccgtaggctactgatgtcttcgttgttccccgcgctccaacactgctattgactattcgcttgaatgacgaacaattagtaacatatttgattgaacaattgttagacgtactgcgtgagagagctattatcaaatcctgaatgtaccctcggccaagcgcctacagagcgcgccgttaaagaatacccttagggatttttatgcagaatgtcacccaaattattgtgagcaaacagcgagaaagggaggaaccgtcgcactcctttctcggcggaaccgccggttttaccttttactggctagctttcgccattccatttctagtctacgggccaaacaccgttttcttcctgctttatacttggccgttttttctggcgttaatgccggtttcggtattaatcggcgtcgccttaagtatgttgctgcgcggtaatgtgctatttaccctcggtgggacgggcattgcggtgatatgcctgttttggatgctgttctctttcctcaccggatggtaaaacgactggcgggtgctcgcggcgaaaattatcgccagaatgcccctatgacctttttaatcctaagcttccattgtgtttttcctcttgctttcctcgcttattacccgttatttttacgcactttttcccttttccctcgcggaaaagtaggtgtaaaggtaaggcaaaatgaaaagtaaaagccgatttagcagtttttccggctaagaaactcacggaggaaagggaatctatgacgactgtcgctagtatagcgtcccaataattgccgttgttttgcagatttgcgtggtatttttgccagaaatcgtccttaatcttaaactctggggcattttcccactcagagtggagtccgacgaaaagttgtgggatgattagtcagtttttcagggggcggagatgggaaaacttacgctactattgttggttttgcttggctggttacagtattcgctgtggctgggtaagaatggtgttcatgattttgtccgcgtgcaaaatgacgttgcggcccaagagggtaacaacggcaaactaaaggcgcggaacgatcagctatttgctgaaattgatgatttaaacggtggtcaagaggcgatcgaagaacgcgcacgtaacgagttgggcatgattaagcccggtgaaagtttctatcgtttggttcctgaccaatccagacgtaatgcgggtatcccttcgacacaaaataacgcgcaacaataaataatgagtaacttcgcaggttcccttcctgaagtcattgctgtattgccggctgctggaataggcagtcgtatgcaagccgattgccctaagcaatatttaaccgtgggcggcaaaacaatactagaacacgctattgatgccttgctgcgccatccgctaattcagcggattattgtagtaataagcccaaatgatgaacagttcgatcggttgccgattgccaatgactctcgcgttagccgggtttatggcggcgcgcagcgtgccgattcggttctggctggcctgatgagcgccggaacgcctgactgggtgctggttcacgatgctgcccgcccttgcctgcatcaggacgatttaagcaatcttttggcaattattggtcacactaaaatcggtggattgctggcgaccccggtgcgagacaccatgaagcgcggtgaatgcgggattgaagcagtggcacatacggtcgatcgtcaggatctctggcacgcgctaacgccgcagctgtttccattcgaattgctgaaaacctgcctgagccatgcgttacgtgaaggtgcaacggtaactgatgaagcctccgctctggagcactgtggctatcacccgttactggtgagtggccgttcagataatattaaagtcacgcgcccggaagatctggcgctggccgagttttacattacccggctctataataaggaatgcacataatgcgaattggtcatggttttgatgtacataaattcggcggtgaaggcccgataatcatcggtggcgtgcgcattccttattcgcagggcctgctggctcattccgatggtgatgtcgctctccatgctgcaactgatgcactgttaggcgctgccgcattgggtgatatcggcaaactctttcctgataccgatcccgcctttaaaggtgctgacagccgagctctgttgcgtgaagcttaccgccgcatccttgaaaaaggctatcagcttggcaatctggatatcaccattattgcccagtccccgaaaatggctccccatattccgcaaatgcgcgtgaatttggcggaagatctgcaatgccatatggatgacgttaatgtgaaagccaccaccacggaaaaactgggtttcaccggtcgcggtgagggaattgcctgtgaagccgtggcgctgttggtaaagagagaaaagcagtaatggacatggaaaatctaacatggctgcacggccaacctaaagcctgcggcgtgttgaaagcaaatcctgaagatttcgtggtggtagaggatttagggttcgaacccgacggtgaaggtgagcatctgttggtgcgtattcgtaaaaacggctgtaatacccaatttgttgccgattatttatcccgtttcgccggtattcatccgcgtttagtgagctatgctggcttaaaagaccgtcatgcggtgaccgagcaatggttctgcctgcacttgccaggtaaagaaacgccgaatatgcaggattttcagctggaaggctgcgaagtgttggaagcggtgcgtcaaaagcgaaaattgcgcatcggttctctcaaaggtaacgctttcactctggtgttacgcgatatcagcgaccagcaggacgttgaggctcgcttaaatctgattgctgctcagggcgttcccaattactttggtagtcaacgctttggccgcggtggcaataatctggtgcaggctcgccgttggtcgaataatgaaattcgggtaaaagaacgcagtaagcgtagcttttatctgtctgctagtcgcagtgccatgtttaatctgattgccagcacgcgtttggctcaaaacagcgccatgcaggtgctggagggggatgcattgcagctgagcggccgtggtagctggtttgtcgcacaggcggaggagctggagtctttgcagcagcgtttggatgccggagagctaaatgtcactgcgccgctgccgggagacggcgatttaggcactcaaggcgcagctttggcctttgagcaaaactgtttggcggatcaaaccgaactgctttcgctgttgaaacgtgaacgtgtggaaggtgcgcgccgcgccatcttgctgcgtccacaggaaatgagttgggactggtgggatgaggttacccttgagctgcgcttctggctgcctgccggtagttttgctaccagcgtagtcagagaaatcatgaatctggataacggcgatgctgcggatcttactgagtaacgacgatggcattgctgctccggggattcaaacgctggctgcggcattgcgtgagtttgctcaagtgcagattgttgcaccggatcgcaatcgcagcggtgcctctaactcgctgacgctggattccgcgttgcgaacgaccacattgtcaaacggcgatattgctgtacaacacggtacgccgacggattgtgtttatcttggcgtgaatgcactgatgcgaccgcgtccggatatcgtagtttcaggtatcaatgctggcccgaatttaggggatgacgtgatttattccggaaccgttgcggcggcgatggaaggacggcatttgggttttcctgcgttggcagtttcgctaaacggccatcagcattatgatacagcggcggcggtaacctgccgcttgctgcgcgctttacagagcgctccactgcgtaccggcaaaattcttaatgtgaatgtgcctgatttaccgttaaatgaaattaaaggtatcaaggtcactcgctgcggcagtcggcacccagccgaaacagtcatttgccagcaagacccaagagggcaagatatttattggattgggccgccgggtgacaaatgtgatgcagggccggatactgattttagcgctgtggaacagggatatgtttcagtgacgccgcttcaggttgatttaaccgcctatgcggctcaagacgtagtcaaaacctggttagccaggactgaggttgacggggaatggtaaataaatccatgcaaaccttactgctacagttacaacagcaaggtattcgtgatgagcgcctgttacaggcgattgaagctgtaccacgggagcgctttgtggacgaagcgctcgcgcataaggcctatgagaataccgctctgccaattggttcagggcaaaccatttctcaaccttatatggtggcgcggatgacagaattgctgcaactgacgccaacatcgaaagtattagagattggtaccggttcgggttatcaaactgcaattctagcgcatttggttgaacacgtgtgctcagttgaacgaatcaaagggctacaatggcaggctaagcgccgcctaaagttgttggatctgcacaatgtttctacccgccacggcgacggttggcagggatgggcatcgcgcgggccatttgatgcgatcattgtgacggcggcaccgccagagattccagaagcattattgcagcagcttgaaaacggtgggagattagttctgcccgtcggtgaacaggcgcaaacgttaaaatatgtgcagcgtagggatcacgagttctttattgaaacggtggaggcagttcgttttgttccgttggtgaaaggggaactggcctgacaattttttaaatcgcgtatttaatcccagcctatttattccggccgggaacccattgggttagcgcgatatgtaaattatacgagattacggtagggcagaggtggtgcaatttgtacccaaggtgctgcatcttatttcttctgcgtttgaccttattattcaaggcgcgcagaggaacctttcatcattagaaaaatgagtgaaacattgacactcagctaggatgtaaagggtatttggaaatatcgcttaatattgctgtcatgggggaagcatgagcacgggaagcccaatgattactttacgccggattgcggcgtgtacggttgtgagtttgtggttggctggttgtactaatgatgcatcaacgtctgcgccaatatcgaccgtgggtggtaaaacatccggttcgatgatgagtggaagtaatgcatcaggcgatcgtattgtttataaccgtagttacaattctatccctaaagggagttacaacggcagcacctatacggttaaacggggggataccctgttttatattgcctggattactggcaatgatttccgtgatttagcgaataaaaacgccattcccgagccttatagcctgaacgtgggccagacaatccagctgggtaacggttccggcggcggtatgatggcggcaactgacgctacctctaatggggtatcaaaaccgccttcaaacatccaaaacacagcttcagcggttgattctcaatcaactaacgcgtattctggtaactcgggtaaacagaatgttggtaaaatgttgccagcatcaggagccgttgcatcaacaacagcacctgttaccgcaccgggcactcccgttggcatccctaccagtaatggtggtccagttagtagctggaaatggccaaccgacgggaaaaccattgatagcttctctgcttccgaagggggcaataaagggattgatatcgctggttcgcgtgggcagcctatcttcgccactgctaatgggcgggtagtgtatgccggtaacgcgctgcgtggttacggtaatctgataatcatcaaacataatgatgactacctgagcgcctatgctcataacgatacaatgctggtccgggaacaacaagaagtgaaggcgggacaaaaaatagcgactatgggtagcaccggaaccagttcagttagattgcattttgaaattcgttacaaggggaaatccgtaaacccgctgcgttatcttccgcagcgatagattgggcagaatacgctgtattctgctcgcggtatcacgggtaggagcagcttatgagccaaaatacgctgaaagttaacgagttaaacgaagatgcagatttcgacgaaaacagtacggaaactgaaatttttgatgaaaaagcattagtagaagatgaaccttctgaaagtgaattagcagaggatgagctgctggcccagggcgttacccaacgcgtgctggatgctacgcagctctatcttggtgagattggctattcaccgctgctgaccgcagaggaagaggtttattttgcccgacgtgcactgcgcggggatgtgccgtcacgtcgacgtatgattgaaagcaacttacggctggtggtgaagatcgctcgtcgttacagtaaccgcggtttggcgctgttagatttgatcgaggaaggcaatcttggtctgattcgcgcagtggaaaaatttgatccagaacgcggttttcgtttctctacttacgcaacatggtggattcgtcagacgattgaacgggcgattatgaaccaaacccgtaccatccgtttgccaatccatattgtcaaagagctgaatgtctatttgcgcaccgcgcgcgagctttctcataaattagatcacgaaccgagtgcggaagagattgccgagcaactcgacaagccggtcgatgacgtgagccgtatgttacgcctgaatgaacgtatcacttctgttgatacaccgttaggcggcgactcagagaaggcattgctggatattctttccgacgaaaatgaaaacgggccggaagacaccacgcaagatgatgatatgaaacaaagtatcgtcaaatggctgttcgaattgaacgctaaacagcgtgaggtattggctcgtcgttttggtctgttaggctacgaagctgcaacccttgaggatgtaggtcgggaaatcggcttaacccgtgaacgtgttcgtcaaattcaggttgagggcttacgccgtctgcgtgaaattttgcaaacacaaggtttgagtattgaagctctgtttcgcgagtaaaaagcttatcggcagcctgaattaaggcaatagataagagagcgaaaacagattcagtattcgctaaatcgaagcagtgttacttcacgatttattgatgatagaagtaaattctgttgctgggttaaataaaaacggtggacatctcgtccaccgttttttttcgactgaaaccggccctttaagaagatggtttcttattatcgagcaatttggcctaaggcactgactgattcagcgccaaaagagccggctagaaaaatagctttaatcgcaaaaatcctaaccgataacgccatattaccttacaccatacttttcaggcgatagagccattccaaggcctgacgagggctaagcgtatcgggatctaaggtttccagtgcttccactgcaggagaaacttcttcattcagcagagtaagctgggagccatcaatattgctacccgctgcattgttggagagtgactcaagctcccgtagcttttgtctcgctcgtttgatgacgtcacggggtacaccggctaacgcggccacggccaaaccataacttttactggccgccccgtcctgtacggtatgcataaaggcgatagtatccccatgctccatggcatccagatgcacgttaaccacgccttccattttttccggcaaggtggttaattcgaaataatgggtagcaaatagcgtcattgctttgatgcggctggccagattttcagcgcaggcccaggccagagataaaccatcgtaggttgatgtaccacgaccaatttcatccattaagaccaggctttgttctgttgcattgtgcagaatattggccgtctcggtcatttccaccataaaggtagagcggccagaggcaagatcgtccgcggctcctacacgggtgaaaatacggtcgactggcccgatagtcgcctgttcggcaggaacaaaacttcccatatgagccagcaacacgattaaggccgtctgacgcatataggtacttttaccgcccatattcgggccagtgatgataagcatccgacgctgtggtgaaagtgataacgggttcgcaataaaaggatctcgtagcacctgttccaccacgggatgacgacctgcaacaatcttaatgcccggtttgtcgctgagcgtggggcgcgtgtagtttaacgtttctgcccgttcggccagattggttaatacatcaagctcagctagcgcgttcgcactcagctgtaggtcggatagatggggtaataatagatcgaaaatttcttcataaaggcctttttcaatcgctagcgccttacctttggaggtcagaactttatcttcatattctttaagttctggaatgatatagcgttccgcatttttcagcgtttggcgacgtacatagtgaattggcaccaaatggctttggccacggctcacctgaatgaaatagccgtggacaccgttaaatccaactttgagcgtatccagccccagtttttcccgctcgcgaatttccagtcggtcgaggtaatcggtagctccatcggcaaggctacgccattcatctaactcagcattgtagcctgaggcaataacgccgccatctcgtactaatacaggaggagattcaacgatagcgcgttctagcagatccaagagttcttgaaatttacctacctgcgatagcaggttctgaacgtggggagcctcaacggaactaagcaattggtgaatttcaggcaattgctgaaatgcatggcgcatccgggccaaatcgcgcggtcgagcggtgcgcaaagccaatcgtgccaaaatacgttctaaatcaccaacctgccgcagtggctgctgcagttccgcagtgatattttgcaaaccactgattgcctgctgacgatgattgagcacattaatgtcgcgaataggcatatgtaaccagcgttttaacatccgactgcccatcggtgttacacactgatctaaaattgccgcgagagtattatcacttcctccggataaactttgagtcaattcaagatttcgacgcgtagcagcatccataataatgccgtcttgttgccgttccatcgttaacccgcgaatatgtggcaatgaggtacgttgagtatctttaacatattgcagtaaacagccggcggcacgcagggcttgatgggcttgttctacgccaaaaccgataagatcgcgggtgccaaactgtaagtttaattgctggcgggcggtatccagctcaaactcccacaaaggtcgacggcgcagcccgtgtcgctgttcaatcaacgacatctgttcgaaggtttctggatacaataattcagctggattggtccgctgtaattcggccgccatagtttctgtatcagcgggttcggaaacgcgaaagcggccagagctgatatctagagtggcataaccaaacccacgggcgtcctgccagattgcggctagtaggttatcctggcgctcatttaacaaggcttcatcactcactgtgccaggtgtcacaatgcgaaccactttccgttctaccggccctttactggttgccgggtcgcctatttgctcacaaattgcggcagactcccccatttggacgagcttagccagatagttttcaatcgcatgatgaggaacaccggccattggaattggctcaccggcagaagcaccacgtttggttagcgagatatcaagcaattgcgatgcacgtttggcatcatcatagaacagctcgtaaaaatcgcccatacgataaaacagcagaatttccggatgctgggcttttaatcgtagatactgctgcatcatcggggtgtgagcgtcgattttgtcggtattattcatgcgtatatatttctaatccattgaaattaaagttaattgtgattttaattgttatcgttaattatcacggtaattcagcataggtaaatactacgtgaatgtggcctaagagcacagcagctctgatcacgcagggggcggtaacctcgcatcggctcttgggacatattatcccagcaactagcaaactgacacgggtaaaagctggaggcatctcgcaaagttatcctgcagtgataggacaacaagcgtagtcgtgcagtacgcactaggttgccgctatctctgatctgtctgtggtaaagaaattttacagataattattttctgcaactcattcgcagtgcagatcaattttaatcataaaataccgatctgtgctcaacaataatcttataacttttttgccgcagctatatatgttgtgcagcgggccatggaatctttgtaatattcattagatagatgaaaaaataataacttataaataacattagaatgttctggcgaaaaaattttcacggcatgaaataatgtagtcgtcaaatatctttaattattcgttcaactaaagttaagattgtgtcacggttagtaatagtccagttattttccttccttccaacatgtgtttatcgatctgtatagctacgattttatcactcatcataattgactcatcatcatattctactctgacactaaactggatgtgtttttcatttgttagaaggttttcagctattttcatacgaaagggatgatttcttttcattttttttgttaggaacgtaaattcctgaattactctgtctttagttgtttctggattcatgttgcttacagtgattattatccgtgagttttccggtatttcctgtattgatgaagaaacgttcccttcaatagaaaacgaggagtgaaaataatgggtgctcatactacaaccagttagactaatacatatggctacaaatagtggaataaataaacgataatttttaaaaataaaaaacatatatagctcattaaatgctaataaaagcgtaggagaataaaattgcggcaataataaaaaaagaagatgctatttttaatttaatatctttaattatgttaagaatctttgtttttgatggtgttgtaggaatgaattcttcttgtgtgccgacgaatctaacgccaatgcgtggaagagtcattattggatcttcattttcacctatcattacaaatgattggcgaagttgcttgataagtttgtagtagctactgtccgtaacaatgacaccacgcgattcccaaatggtatatagtatttctcttttctcacaggttttttctaagagcatttgcaaaagacgtgactcattctcagataatcttatttttttttcatcattaaccaagcttcgttgtaatgtatcaaacacgatgctgccattcagtcgtatggttttccctttgtgcatataatcgtttccttatatcaattcatttacacagactattctgatgttcgtgaatcattaaacgatataaattaggataagtctaatattcttggttcactaaatggttgttataacttattacaagatggttattgataataaatatgaataaacaaaactcgaaacatatgaattaagttgtaaaggtaattaaattacagatggatataagatatttaaactatttttaatgataagatggtttgtgagttgtaacacatattaatttactataactatatttaaggtgtgttagctaacacttgagattttgtctctgacaaatcggcatctgaatatactttttccattatgagtttggcatatttatccctaaatctgggggtttcagagtgataggctcctacagctttccagctataaccatattttttaaacttgagactaagcaaataagccccagcctgaatgttaatacatggagatttcaacatatttgcgttatcaataataccagccgattgcagtaatgagatattaattgaatttatctgcatcaagccaatgtcatgactgccattctcgtttttattcttcgcattgattttccaggatgactcctgagaaataatagattcaagaataacagagggtacattccatttttcggcggcagagtttagacatgtcgaatgggctgatccaacagagaaaagaaaataatatataatcggtgttaaattagaaaatgtcttcctcatcatcactctcaatgtaactaagttgattgtttaatatactgctagtgaactctttaagggttttattaatgatggattcgtttattaaaaatggaatgataatgttggacgaaagctctttatcttctttacttccgcttgactgtagtaaagtattagcatgaacaataatactagattttgtattattatcattgccattaagcttttctgaaatcactttataggcctctttcaggttttttaattggttgatttttatattattaacaagttcataagccaatttatcagaagcatcattttttaatgattgaatgttaattttgttcatttctattctcttggcatttccggtattagctataactttattcaggttgctcgttattttcattttcttctcgctggttgcatgtggtcaatcttattatttctctggttttttttaagttaacaattccgttaatattcaatatgtgtttttttattggtggaaatatttcttgcaagaattcaggacggtctttatttggatcaaatactatgatttcatcacctaccttgagaattatattttcctgattactttctatgacataagattcattcttcaggtttcctattattttagcgtaatgaattttgggaatgtgtagttcaatatttggtgatgatattgaaaagccatgaaaatgctcagaaaccaattcgataaatctcgtatctccaaatatttcctgtaatttatttttaagtctcacctcaatattggcaatatttttgttgcatatttcttgatagaggcttattgctgaaatgacagtgtcaataaataaaaaaatcccgctcttgaagccaaaattatgtgcttgatcagttatatgtttgatttcaacttcagctttagacaaccttttttttgcttctttctttgcgtattcgattatgcgtacttgataagcattagaactaatacagcacctcttgataagtactttttcatttgatatttcatgcaagggtgttttttttacttttaacatgataacaaaccatttctatcaaattgaagggtagtctcgcacattgcaatgtgcgcatgatgttcatcacacgttggctaaatacgcgttcagctctgcttttcaatgttgtatcgaaaaaaataatcgtttcaacaagttgtagtgcgccaaaagccattatataatttggggtaacatatttttctttatacttttgtaatatgtatttgaacttaggtagcatattgtttcttaactctatatcatcatcggttaataaatatggatgatgttttgtatcaactccaagtattcctaatctccaggctatatctggtaagttaccccacgattccttaatcaccttaggaatgcagagtgacagcttgcgtggaataggtagttgatatttagcaattaaataattattttggaaagcctgaagataaattggtgagttattatgctccattattctgtgatcagaatgaaagtagcttccaggtgatagcaatatttttaaatgatccattaaattctcctattgggtattgatctttttggatgaaccacttcttttttccataaaacgtgcggaattacgaaaatagaagagcatgaaaataattaagttagtgattaggatgattatcaaaatataatatggattaaaagtattagatttactatctagtgatacactacgttgaataatcggacgttcaacaataactacagagacattgtcatatgaactgtctgaaaaactattttttaaaaaaagttttattttagtcatcaattggtttggatcttcactaccagcataagtcactaaacaggatatattttgctgctgagtagtcctgctattatttaatagaggataactcacatgcactctggcattgacaactcctggtatggtcaaaacagattgttcaagccgctgttcaatcagtgaaagtaatctggctcgttctgcatgaggtgaggcaactaaagaatcactgggaaatgcctgaataatttctacggattctttagaaggcaagttatattgcttgagtaaatctaccgccgcaataaaatcatttttagaaacatgaatggagtaacccaacttgccatttgccttttttttaccctgaataccgtattgttgtaaggtcgccaagacttcattgctttgacgctgatctagctcggttagtaaatcttggctatcgcagccagtcaaaaatagggcaatggctgcacataatataaaccggcttattcgcatcattattgagattttatcgtagtttctacagctgaaatagctttacgaaccaatgtattcgccagtgatacaacttcagcatgttttcccaatcgtatctgaccgactctgattaattctgcggaatcagttatatttccatgctcgattaaattaactattgcagctttctcctgactggttgctgcagcttgctggctgaacaatttttttattatcccttcgatctggcctgctccgtcgaaaacggattcaccaatatcagggagctgatttttaaatgaaattaaactggttaaatgactcatgtgcaatgctctaatttatattatatagttctaaatattacgaataatcccggatgtaaggtcgaggagtttctttgcaacgttagattgtgcttgcctaagtgcagaatattgacctagatacaatgtataatctattaacttaattgggttagagatatcttctatagcacttttttgcgccgcctcgattttattcattaggtcttttgtgggctcagtgaatttcccagcaatatcataagcaaagtttgctgtttgcccggatagtggtgtcgtgttttcaaagttcttaacggtatagtttggcgtggataatgttgtcgttggcatgataaatttctctttattttcttagtaagaatgttgtttaaaatcccaatgattgttattgatttttatattttcatttatatcattaataaacactccttcatataattcattatcactaagtgaaatagagaattgaatgtaattactcccccattcactaatgaattttttgacaaaattcatggttgatatcagttgattgtcactaagatttgagcttacaaccacaataggttttttttcatcttctataattctgaatggcacattacttgcttttattcctcttattgcatcatcaaaaattgcttttttatgataaaacttaacttctatctcgttagcacagctaactctagattttatcgtttcatttattttttctacttctgataagtaatccgagcttttcaataacttaacaataggtgagcaaggataactcatatcaatatttaaaactgacgatgaaaagggggtgattaaggacattagctctttctctaactcgctaactaaaataatgtcaactaagccagcatagtttgacgtgagcaattgctgagatacccagtctgcatcgcggcggctatttacaatgacttgatctttccctcttccttctgcttgcagaataatggtgaaatgaattgatgattcacctaaaagtttagatatgttgcttgtaatgattttatctacttgcacattagaattatgattgttagtcatgactgttaataaaatcaagccaacagttaacattgaaataaatataataattaaatgcttagatgttcctctctttatcaagcttccatttttctgtggtagagaagagtccattgtatctttttgtcctagctcatcgaaggattcataattccatgaatcatcgatcgacttaaccagtataggaaacgtatcggggaataagaccgtttgtaatatgacatcggtagtcagtttaggtgtgtctttttcattatctaaatcttcaaaaatgactgatagtttagcatctgatttgtttgcttcattggtataggatgaaaaaaaagttaacttataattgccagtatcaataggaaaaaagtaactgattaagtcattctcttcatcagtcacaacgttatagtctgtctctgtgttcgcaaatatcaggcaacctttagatttaaacaataattcggtgccagtcattcgaccagaggctatttttattatataaaaatcggcgttattattcatagcaacgaaggttctattggtgtaaaaatcagtcattaatgatgagctgtatttcttaaagagaatacaactaaaatagttcgcatacatcttttaaagtttggttattattgccgatttgaatctattactcatcggaataaatcgcactaattcttatcgtttctggtaccggcatccttttataaaggatgtttttttcctaataattccaaagaatgtgattgttgctaattgtagagtataaccagattttgtttaaataatcagatgctacttcctgttaaggttttttattcatgagtataagtaagagcaacaataatgtggacggagaactacctgctcttgattgcatgattttctatgtcaggccaatggtgaaaggttctatattagaatacccatcatttatacggaaagaaaaaggtctggtactggattcctcacttttaattgcgccgagtttggatgacttaaatcagatttccggagtttggagtatcagtgggatacctatatttagtgctattgaaattttagcaacgcttgatgaggctaaatcacaatcaaataaaggtaaaaggcctccatccgatagtgaaatcaaatttgaagattctgtccctgtctggtatgacaggaattattcaacctggcgtaattctgaagtgagtggtttacttatttctgaagtcatgaacggggggggggtattatttatcattattaaatattcttcgccggtatgaggcatatggaatattccgttatcttatttcacagtcagctaatggagaaaatataaaaatatctcagttgagcaaaaattatggattatcgtccccctactttagatttctgtgtcgtaaaagttttaattcatcggcgaaaaaaaagatgatgagttggcgtatggcaaccgcggtcttactgctaattgaaagtgatatgtcaatattggatgtggggttagcttgtggttactgctctgcatctcattttacattagacataaaaagaaatttcgggctcactccatctgagataaggcacctggagagtggtttatatgatagttaatccataccttttctctaaaatattaattttatctttattaacttttagctatgcctctccaggatttggagaggttattaccgctacgccggtagaccgggaaaaaagtcagagttcatttattgccaataatataacgattaataaggtatttgacgtcgtttcatccaggatagaaaagccgattattcttagcaaaattgcaatgcaaaaaaaagtgactggcaattttgacatgtcacaaccggaagaaatgtttaagtcattagctagacggacggctttaatatggtatgacgatggaaccagtatatatgtatatgataatagtgaaattcgcaatgaactaataaacttgcgttcaacaagttggagtgagttgcttaactatattaagaccactggaatttatgactcgcgttatccactacgttcagagggtaaagcatccgtagtctatgttgcaggccctccactttatgtcgaattagtattagctaccgctcgctacttggatgagcggattcaagtcgaagagaaagcagggactgatgtgactattatcccgttaaagcactcgtcggttaacgatcgtgtttttagccaacggggcaaagccgtgacgattccaggcatggtcaccgttattaattcattgttcagtaaaaatgctttgggtaacaacgttcatgttattccgcgtgaagatatttcaaatcagatagaaacaggttttccgttaccaccggcggcgctggatttggcgcaacaaaattacggagctattactgacacgggaagtagtcacttttccgtagttgcttatcctgatagtaatagtctgttagttactggttccgcgcaacaaactcgctatatatatcaattagttaacgccctagacgtttctcgtcggcaaattgaactttctctctggattattgatatatcgaaaaaaaaattagatgaagtgggcgtccgttggcaggttggtagcgtaaccgcaggcgggggtgacattgtttttaatcaaagcaatctgtcaaatagcgccaggtttttggcacgtattgatgcaataagccgtactggtgatgctcaaatagtttctcgtcctatcgtattgacgcaggaaaacgtcccggcactttttgataacagttcgagtttctatgctcggctggaaggtgaaagggtcgcgactctcgagcaggtgacctacggcactatggtgagtgtattaccacggatttcgcacggagggcaggttgaaatggacgtaaatattgaggacggttctcccggtcgtagcggtagcggggatgtagaaaagattggcggtttacctgtagtcaatagaactcatatcagtactgttgctcgaatagccaaagaaggcagtttacttatcggtggatatacccgcgaacaattagaagaaaccgaggagaaaatcccgctactcggtagtatcccttatttagggcgactattcagctatagaagtactaatcaacaaaaaatgattagggtttttctgatccagcctcgtttattaagtgagtcagaggcctgggatggtaggcaattttcagaaaaagagcgtttgagcgatagaataaaaaacaaaaatgaacagctacaaggaacgataaaattattgcagaactatatggatagtccatggccatagccccacttggtggaaactcacgttatatctcggcgcaacgtgataagaatgaggaagctcaaaacactgctggtgacagtgagaatacgctacgtgggcaaggcatcatcgataacactagcgaatatgcatcaatggcgatgttagcctcgcagtttaatcggcgcaaagaattacgttcatcgagtgatgataatacgatatttaccgagagaattttggatgataacgctgacgagaaagtaagtcatattgaaaaaatcattaatcgcgaggaaatgactcctcccaaattacgttcttttctggctcagttgtttcctgataccagcgacatgttgatggttatttttgagctcctacgacgaaaaaaactaaccagtaagatcgttagtaatttaaatacgttgaaaagtgtcttaaccgaagaagatacagagcgtaggactgaagcgggcgttaacgtagcattatcggcaaggttgttctcgcattccttggataagacatcgattcaactgcgggatatatatcgtgactttatttgctacgatggcccaatcatttatatttacgaacaatgggtaagtgaaataacgagtcagcaacgagaaattatgctgcgttacctaacacgttcactagcttgcgatttgcaatctatccctacaggaaatattaacgttgtagaatttggtgatctattccgtagagttggtggtttaagggagattcaatcagttgagattcattttctgcagaaaataatgagtacagagcttataagcataagtaatgatcaagaattgtctaatcttttcgtttctgggatcaggaatatagataattataaaataagtttggccaagttttattctgaaaagttatcattagtgacatatgaaaccaaggctatttttttacagttgttattgagtggtttctccagtgtgtctgtagatatttttttctcgttagagaaaagggacaaactcatccatttaatgaaagaaaaaattagccagataaaattgaaagaagatgcagtgaaaagaataaataaagttaagagtagggatgaaaatgcgtagactgtcatggttcctgcttcaacttaggagtaagcctgagttaatggttcttttggtaatggtgacagtgatagctatgctagtcgtccctttaccaactttcttaatcgattttttgatcggtttgaatatcatgatttctgtacttatttttatgggttcgttttatatcaccaatattcttaacttcaagacatttccctctattttacttattagtactttatttagactagcgctctctatcagtaccagcagactgattctattagaagctgatgctggagatattatagctacttttggcgagtttgttattcaggacaatttagtcgtagggatagtcgtcttcgccatagtcactgttgtgcaatttattgtaatcaccaaaggttcagagcgtattgctgaggtggcagcgagattctctctggatgccatgcctggcaaacaaatgagtattgacgctgatgcgcgttcgggaattattgataacgatcaggtgaaaataaggcgaggcgttctagaacaggaaagtcagttatttggttcttttgatggcgcaatgaagtttattaaaggtgatgctatcgccggtatcattattatttttgtcaatcttgttggggggatttctgtaggtgttgctcagatgggaatggatatgtccgctgcactcagtagttatacacttctgacgatcggtgatggtttggttgcgcagatccctgcactgctgatttccatcagcgctggttttattgttaccagggtgagtgggaatgataaaaaccttggggaaaatattgtatcagagctattttataatgacttttctcttctggttactgcaattataacttgtactataggtttcttacctggatttccaacgttcatatttattatactttcctgcctactttttggtctgtatttttatcggttctataaaaaaagtaaagaagataaatcggttaataaagtacctacgggagttatagatactcctaataatgttactaccggcgagaccatcaggactatagagaacattgatgattatgttccagaaactctgcctataattgtttcagtgtctgttgttcatcagaaaatattagaagatagagacttttcgctaaaaataaaaaaggatattttcataaaatttggatatagagttccagatatagcgataaattactcccctaccatcgagcaaggaaagataattatcttgatcaatgaaatatttgctggcgaatttagtataagattcggtcatttaaaaatcattggttcaactgatgaactggacattttaggcatagagttatttgttatacaagaagataatggttcttcgagtaaatggattgatagtaaaaaccaggaaaatgcgacggcgctaggtctgaatttttgcgatgatataacggaaatggtcggttgcattagcgggttattattacgtcatatccacgagttttttggtattcaggaagccaaaaatttattagatgatctggaagctaaatgtccagaattactgaaagaatgttatagacatgccacagtacagaaaatcaccgaagtatttcaaaggcttttagccgaaaaaatatcaatacgaaatatgaagctgattttagaatctttagtgcaatgggctcctaaagagaaagatacactgatgttagttgaacatattcgatgtacgttaaaccgatatatatcagataagttctcagttttaggcgtaatgaatgtattaatgcttggcggaggtgttgaagatactatcaggcaaggaattcgacaatcatcaggagggacatttttaaacttagagccagataatgcggaaaaaatagttcaatcactatcgctggcaataagtaatgtaaatatctctttgagagatttgatagttctagttcctgttgatattcgccgtttcgttaaaaaaatcgtagaagatcgtttccctgatttagaggtgatctcctttaatgaaatttcagaatctacaaaaataaatgtaataaaaaccatatgaatggagtttatatgaaatataaatttattgaaatgcttaatgttttccttagctcggtagggcgtgatgatttagttaataaaaatcttgattgccactctaccgttcaacttgagcttgacggaaggcaggctattaatgttgacatgcacagtgatgatattattctctggatgtcactatctgaatacattccttccaggatcgagcaggtcagcgttaggttacttaactctatattagagtatcagtcttcttgctttcaaccagggcagccagcgttacttgttcatgataatttattaattatgagcgccgttttaaatagcgcagctttggatgatttgagtttgtttgctaatagtctggaagaattcttcgatcgcagcacgcatcttgaagaaattttaatttattaaattatgagattatttgactatggcgctcatccaacccgaataagcggtgtattaatcgaggctccattacctaggtgtttcatcggcgagatatgtgtgattaaacgttctttgactaacggagagttaatcgctaaagctcaggttattggtttctgtgccgggcaaactctattaagtctgataggtcgagttcagggactttctctggatgcggtaattttaccgttgggtaaaccctttcagtttcctatgagcgagtctttgttaggaaaagtatttaaggcctcgggtgaggagattcagtctttctacagctcttctgaacctccagataaccaaccgttggagtggaggaacatagattcatcgccaccagaaatcacacaaaggagggcaattggtaacagatttgatactggaatcaaagcgatagatggtttacttacctgcggcagagggcagcgtttgggtattttcgcggctgcaggtgcaggcaaaacatcgttgatgaatatgataatagcgcattctgatgctgatgtttgtgtcgtcgcgttggttggggagcggggacgagaagtcacagaattcattaatgaaatagctgattccccgcgccgagactcgaccatcctggtttatgctacctccgatagcccttcggtggagcgttgtaatgcagcgttgctggccacatcaatagcggaatattttcgtgatttgggaaagaatgtggtgttatttgttgattctatgacgcgttacgccagagcacttagggatattgcgctgtcagccggggagttgccagctcggcgcggttacccagcttctgtatttgagcaacttccttctttattagagcgaccaggcaacatgcaacaaggctccattacggctttctatacgatattgctagaaagcgaggaggagatagatcccattggtgatgagattcgctcaattctagatggtcatatttatcttaattatagattagccggacgcgggcattatcctgccattgatatattaaagagcgtaagccgtattttctcgaagatcacgactcctgagcattatcaggctgccacagatttacgggacatactagcccggttagatgacattcaattttatctggatttaggagagtatcagcgtggtgaaaatcaggaaaatgatcgagcattagatagaaaagagaaaatagaactgtttttaaaacagaagaccggtgcgaagagtctatttttagaaacacaaagagcgttgtatgaacttacttcttaaaaacaaaaattacttacgtttgcttgaaaaaaaactgaagcgttcccagattgaattgaactcaataaataagaaaataacatcagtgagtgagaaagttgaaagcatcgctacgcggatcgaaatcttagatatgcaagctggattattcgatcagaaaatgaagtttaccagagaggatttttttgataatcgccgccagaaatcaatagttttgaacgaaatattcttattaaaatataagatagaaacgttggatggagatttacagcagctaaagcagaacagaaatataatcaccaagcgagtcatgaattttaatataaagtgtgaaaagttccaaaaatatcttactgggttacgctgcaaccatagtttaaaatctgagacttcgagggaaattgaaatcgaggagctgtcggctcatggtggtattcgaatataaaataaatccggtattaaatattggacatcatgagacagtatcaattaatgatgctgtatccaggtcttttatcaccgattcggtgctagtttctgtggcaatgttacctgaggatgaaacgctcctcaataaaaagttaaatcaggttaaagcgccgtttctaaaagctagtttatctcttgatggtgaacagcaggagggtgggttgctgttagcacctttagttatcatagaagcgttattacacattaaacagggagtctcttttagtgctcagcctgaagtgaaagaaatacatgattcggcattaacatatttatttggccgtgagtttattcatatgagctcattcgcggggaataagggtgtgggcaaccaaagaagaatatcgagctctaaagttcttatcgctttatctgatatattgaagctcgaaagtactcatattgattcatctatgcccacggttcagcgtgaattacaacaatatcgcggtgaatatcattcgggagatataagcacgccaaatcagaattcaagtgagaagaatagagagatattgaccccatcgccacagaataaaggacctataggcggaatgataacgggtgatgccgagcaattattgttggagtcagaatgtctttctgggtctattggtttgagttggtcacgagaagttgatgcaacggatggttttttagataaggtaggtatgccagggttacagaaaatagatctaacgcctactttttacagtgataagacaggcacttttgatgacttttttgataatgaggtgagcaagtatatgccgttaccacctgagaacccagagaatgcatcgcgtgggttacattatcgattttcgtcttggagtgatactccttcggtcagaattcaactggcaaagatgcagagaatatttgcaacggcctctgatgataacgtgcagtatattttagatgaaaattatcatttgctggaaacagaacggactatgatctttgaaccacgtaaaacatatagagaaagaaaatttgattatggatattcggatcaggatgaaaaaccataatgtttaattttcggcgggttactcggcagcatgcgctaataataaaacagcagtttgactatgagccacaagtactgccggagacgatagcagccaataggacatatgcaattttccagcttcattgctctaaagaaagattaattggagcgatcgatcttgttgattggtgtcgatacatttggccagaactggctgggttggcctgggaatacatcggtgaacagcaactattagaattatttaaaaatgaagtaagggaaagaaaattattttctggggtttactcattacaagacattagtattttatctggagaaacaggacggaaatattggttgaaagttcgtgaatatcatgttggctggattttattatcgcgtgcaccaatttatttaataccaataaaaggcgaaactgagtcattaagacatttaccgataatgagtaaatggattctaggaaccagtaacatcagttatagactattaaatttattggaattgagagatgttcttctagtgcaacatattttgatggaacttaagatatcagataaggctatagcaacatttttatatcaggatcagggagcgattattgtggacacattagttgataacgaaggaaatactgaaaatgattttttggatgttttgaacgagaatccagacgaggaattaatcgcttttcctataaaaatgtccgaaatatcagttgttttaactttcgttcttggtaaaaagtcaataagtcttgatgaactgtcaaagattcaggcaggatttcagtttgaactagaacaagaaatggaaaagaaaataaaaatctacgcaaataatcatctgtttgctgaaggtgaattaatctatattgatgatgatttaggaattgaagtaacaaaaatggccactttaggcaagatagagtagataaaaatgcctgatgacatatcgcttattgcaataatagcaattgcttcactcttgccatttattatagcttccggaacctgttttttaaagatatcaattgttcttattatggtccgtaatgctatgggagtacaacaaatcccgtctaatattgcattgaacggaatcgcactacttctttctctctttgtgatgatgcccgtaatcagtgacatcaatgagtactcaaagacgcggaaagtaatagtaacagattcaatatcgattgaagaatttattgatggagggctagggaaatataaatattatttgaagaaatacgctgatcctgaattgatttcattttttgagtctgttcaactggggcgtagcgaggaagagattgatattgaaaacgaaggtgcatcgctattttcacttttaccggcttatgcactcagtgagataaagtctgcttttgaaattggtttttatatttacctgccttttgttgtgattgatttaattatctcaagcatactgttggcactaggtatgatgatgatgagtccggttacaatttctgttcctataaagcttattctattcgtggctatagatggatggtccctgatatctaaaggattaattatgcaatacatggaactttctcagcaatagcttatggaacagataatttatgcaagcaataaggcattgttactcatcgttattctatccgctattcctgtattggttgcgactatagttgggctatttgtcggattaatacagacggtaactcagctacaggagcaaactttgccttttggtttgaaattactagcagtattcggctcgttatttatgatgtcaggatggttagcagataaaataacgagttataccctagaggttttatctattgcgcttcaaccgctaacctaaatgttgtatgaataataatactattaacttatatatttctttatacgatacctttagctctggcatgataacgctcagtattgcctatttacgcattgctccagttttctttctcttgccttttttaaacactaaacttctaaatggaatagtgattaagaatagcctaattatttatataattttaggtctgtggccatatttatccgtaggtgatgatgtcagagagcagcgagaaattattgatattgtattatatgaactattaatcggcattatctttgcttttctaatttgcttacccttctttgtagctaatattatcggtgagataattgataatcagcgaggtgcgacaattagtgatacgattgatcctgctaatggcattgagtcatctgagttttctgcatttcttaattacttgatatgcatgattttcttagctgatggcggggtgtataaattagtcgcggcttttgctgatagttatcgcatgatgccattctgtcagggtttttctcattttgaaccactgataattggggcttggttaaattcattggtgagccaagggttgatactggcatcaccggttttggtgacattatttcttagtgaggttgcactggggctatattcacgtttttgcccgcaacttaatgccttttccctctctctagcgataaagtctattattgcatttagcgtttttttgctttatttccataatgaaataccgtcaatattagtatctatggtagacatgtctcttttattggatatttttacgcttaaataaattaagttatttttatttgaatttcgatgaagtatattttttatttgggaatagaatggcagagaagacagagaagcctactgacaaaaagatccgcgattcggcgaaaaaagggcagagctttaaaggaaaggatctggttgctgcagcggttttagtttgtggttccctggcaattagtgggttctcgagtcttgagaatataggtgaattgctacaaaaggtactactatcgccaaaagagattaacatacctgcctatctagatgagttgtatcgaatttttctctatgccgtagtgcctgttttgttattctgtttattgcctggggttttactttctttattacaaagtcgtttcaggctggcaacagaggcgttaaaaataaacttctcgcaccttaatccaatctctgggatgaaaaagatatttggcataaggccattaaaagaattagttaaggcaattttatatttgttgtctttctctacatcaatttatatattcatcatggtatggaaacgagatgtatttatgctttatcagtctcagctaagtgaaatgatagagcaatggtcatggctgtgcgttgtttttatttttttatttctctcgtcatcattaatattgttgcttctggatactttggctgagatttatctgtttattaaggatttaagaatggagaagcaagaagttaaaaaggaatataaagaaagtgaaggagatccaattataaaacatgcgcgaaaaacaatacatatggatattctgtcagaggaaacaaagcatagtataaaaagctctcaactcgtgatggctaatccaacacatattgcattaggtatttatttcgatccagaagtcgcagatttccctgttgtaatagttaaagcaaagaatgcagaagcgctcgcggttatcgcttttgccgaatcggaaggtattcctgttgtaagagatattattttagcacgcagaatctaccgtaatagtaatatttttagttttgtccgagacaatgacatgctggatgtaattaatattattatttggctaaaaagaatagaattagagaagatgggtatatatcttcctcctgcagaagagcttgttgaagaagtgaaatctgataccagtagtggaatcgatagtgatgattctaataacgttaataatcagtagagcaaatgtattatgatgactataaatgattataggttttttatggtttttataattatttctatatttcccaatcgttttttaaaagatagttagcgtaagtgtcgtctagactgaccttggtatatcagggctgtttggctatataacataaggagagcgcgatgagtgaatcaaagaatgtagaacaggctctgataaatactgccattactgaagatgagaaatatattgatgatgtctgtcaggcattgttggatggtataacatttaaagatatacatgatattcctgagtctacaatgcaaggaatctatgcatacgcttatgagttttatcatcaaggtaagttagacgaagcagaaacttttttcagattcctcagtatttatgatttttacaattctgattatgtcatgggattagcagcagtttatcaattaaaaaaacgctttgacaaagcaacagaattatatgcattggcatttatgctagcgaaagacgattaccgaccactatttcatgcagggcaatgcaacttgatgctaaaaaaaacttcggcggctttgcattgttttgagactacggtgattaatacgactaatgctgagttaaaacagaaggctcaggcttatttgtctgctctcaaacaaaacttggaagaaaatcgatcctgatgtacggggcagggacgataaatttatttaaaggaatatattatgactattgaccccagtaagcttaccagagaaagaattaatcatgctttatcttttgttgctgcgggagtggggccgggtgggttattgatcgcgaaagataatgccggcaaagaagttttggctcttgaggatgcctgtcgagaattagctgcagaggaacaattgagccggcaacgcaaaggtattaacggagccccgttgctaacgaaaccgcagcttatgacaaaggctcccttggcgagccggttgcagaatattgcccattctgataatcgtcctgctgagggtaatttaacgaaagaggctacgccattaaccacgggtaattacctaaatggcaatacggcattactgcaagccatgctcaacttacaggatattttccataaagataccatcggtaatatgcagaatcggctgaaacagctcaacgtcgaatctgaaacaattcaccttcaaggtcatgctttagtggcctcttttgaggaagtgaatattgagctgcgcgcggcaaaccaacgaacgaaaatgtatatagaagacgttgaaaaagaacgtcatttattaaatattttaaaagcgaagggcagttcggttgctcaaaacgcacgttctttaggctcacaacctgcatttagtgtagaaactggcccagtgcaaaagtatatagcggccttccccgaaactgtgggttctaatgcccaaactcccccttatccacaatctgaactgactcgtgtagataaggaaattgctacgcttcaagtacgtttggatgcaaaagagaaacaggccgcttgtgcagttactgatgctttggctatagcaaaaaaagcttccacctcgcatgaggaaatagaaaagtttcttacagaaattggtaatcgcgcacccggtagtatagataaggaaaagcatattagtgcgttaggacaactcgcgattctctctgctctgctgaaagagctgattggcaaattgaatcttgataatgcgttacgacaaaaggctattctggaaaagatagacgaaaccgcttgtcgtgatgcagaaaacaaagctaaagagtgtgaggcatcgcaaaaaaaagccgaagagaccagtaaggcggcatcctgcgctagtaaaattcttagttacgtgatgatcgctgtttcagttgttgccacggtcgctactctcggtgctgcgtctgcattaatggtttgtgttgcagcggtcggtattgctatggcggtggcagacgtagtgcttgaagcaacaggaaatagtagcttaatgcaaatgctagccaaagaaatcgccactggtataaccaatgccctgattgcctgtggcgtacccaaggaaaaagcggaggacattggtaaaattgttggcgttgtattggcggctgttgctttccttcttatttctctggtttcattgtcatcattcgtaaaaaatatggcatcgtctcttgctaaattaatcggtaatggtgtgctgaaagcaggtgcaaaattactgcccaaagccgcagcgcatgctgtagggaatacggctgggaaggtaggggatagtctgaatcaaggcattagccgtataggaaaggcaattaataactcagtaaatattggtgagacgactttgcgcaaggtagaaattggctccaaagtaacaggagctgctgtgaatgtgaataacgtagcgatatctggaacgctaaatattatttctgctgattataacttagacgcaaaaaatatatttgcagatttaacattaaatacagagtttattcgttcaataaacgaattgattcggcgcataatggagacactttcaacatttacgaaagtaggcgctgaacatttggacaatatgattgaagggatatatcaatctcaacaaaatcagttggccgtggttagacgtattgcgagctaattgtttcgtgatattacctgattattaaaacagtttaatctcgataaatggagttattatgagttcaaactttaatgtcaaatcccaagcgcctgtttatcatcctgcgataaactccgatcaaaaaaatagtccaataaattctagtgaatcagctgagggaacaataaatagtttaaatttaaactcgttatctggattacaagatggatcattaaaacttccaaactcgggagtgactcttgtatcccctcagaaagaaatcgatgaaagtgttttagctggtttatccaaaaatttgaatgaattcatgcaattgtattctaagaatgctcctcataaaagatattcgccaaactcagagttacaacagacccagtcagattattttacaaacgtactcgcacctgagtttctacataaaatttctggagccttgattgcacgcgagattggtgtagatagagtctcccactttgatgggtttacttcagataatttaatgatattcatcagatctatgatacagcgacaacggatgactgcggatgaaagtaacgccaagataaacatcttcctagcttcgctaagcgctacaatggctgaaaatgcagcagattcaacaataaaagagggcaagcagcaactgatcggggccatattcagctttgttatcggttctgtcatggtgggcgccggtagcggtatacagctacgtggcttaaataagcaaaataggatgctgaatgcagaagttgaacagcagcagccgaatattgctactaataaagttggtgacgtcaggcagagccttaatgttatggattcaagaggtgccagcatgaatgcggttggcacaatgaaaaataataaaataggaacgctaaatgaaccaagagaaaggatgtcttccaaagaaatacataatcatcccaaagataagatacaaataaaagcagagcgagaacgaccccaagatcttaattcatcgttgagtacggccaagccaaaccgccatactgggcgtaaattggagatagttggcatggctatttctaatatggcgactactggtggtcagatggtttcgggtatcaacatggcggaagttaaaactattgaagccaacaagatgatacaaaacactgccgcagatataactcaaactattttaagagaaaaagaaagagccgctagctctcttaatgatatgtttaaaagcatgcaggacactattaacgggataatcgctggtcaaaatatgacatctgcaaaaattattcgtggctaagatatttaaattaaggaatcatagttatgataatatctacagtgaacgcattgccgatcaagcagaattctagtcagattgaatcgttacattctacgttgaatggtgggggaggcgatgttatcaatagcgacttttttgattctattatatcacgttaccaagatggtaataatcatccgaatttaataagtgattggttaagtttattggcgagtgacaatgatggggtaagaagattgatcgcggtggaaaaaacgggtgtaacgaaaggagatactcaacgtgtcattaaccgtgtgtcagatgatattcatgataaatatgaaatattatcttcaaaatataatcatgatgaaataaatatacctccacatataaaaagtttgattgaagttgtagatattggttatgaagattttcagagtaagcataaagaaatagttgagagatatagtaagtattacgaagcttttagtgagggactcagtgcgcagtcaaaatatgttggggctgggagtgatgcaaataaaattgattttaaaaaacggagttttgccgctagtctaaacgataaacttattatctatagtcatgaaccgagtttttatgatgcagaaactggcaaaataaatgaaaatgctttttcaaatgtaaaaacactttatacgttaacgggtgatgaaaaaagatttaattactggaagaaggaactgtcacctgaattaaatgtaacttgggataaagagaaaggatatatttatgttttacctaatctggataatttaaagagtatatttaaaagtcttgagaattctgatggggtaataataaataaccttagtggaaatgatgacatcgctaccgcaacttatcaagcatggcaggcagggaacgacagtataaagaaccggcagcaaaatgctcttaaccagcttacggagaaatatggtcatcatctcaataagttggaaaacttaattcagttcttgattagagctatagaagatcacgccaaatccaatgaaccaacgttaagaattctagcgtagcaaagggatattatgtctgacacaaataggttcgccaacactcacgatgttttatacgttggtatattacaatggttgcagaaaagtcttgttacgataactaattgtcctctgtcgaaaataaatccggatgccagactaatactggatttgcatatagactctctagaaatattagagttggttattgaggtagagaaagaaacggctaagccgttagctgatgatgtttggcataaatggaatacgataaatgatatcgtagaatatataaaactgacgaagataaggtgagtgtatattctgcattcgatgtaatttaaaatatcgtcattataaaacccgaatcagtatattaaactttaataagcaggttgtggttttacgcggctggtttctattctaatatgatgaatccatctttttacgatgagttaatcaatgctatcagttaaatatccgttgctcctgctattaccactattgctcgttaatgggtgtcagcggccaacaaatagggctccagtagtggagacaccacagcagattgaacagctatctgcactgatttctggtgccatgtatttgcgacaggaatgccaaaggaaagatattcctgatgaatcaatacttatgcaaacggcggtaaaactggcaatggagcgaaattgggataccaaagcaccagcttatcaagcgctgaaagggaaaagtcaggcacgttatcaggctcttgtggaagaaattggcaccgataataatcaatgtccttctcttaacctgctactggctgattttgcctatgaagctcggcgtaacatgaaatgacagtatgttatcttcattaattgcatggtaatgatgcagaaacaatagccaacctgcgagagctaggaaagggccgaaaggtaaaggtgcacttaacggcctatttctaagcaaatgcgcgatgaaagtaaaactgctcccagcgagggaagcaatcaaaagcagggccggtagctccatccagccgagccaggctcctaaggccgctagtaatttaaagtcgccatagcctagggcttcacggtgcgttgtcagccaaaatgcccagtaaaggcaccataagactaaatatccacccactgcaccgataacggcatcacttagtgccaacgtttgatcgaataaatggaaaatcaagccaccccatagcaaagaaagcgtgaggttatccggcaatagcaaatgctcaatatcaattgcggttaacgctattaatacccatgtaaagactaatgcagcaagaagcgtatatccggcaggaataatcatgctgataaataatgttaaagccacagtcgctagctcgatcatgggataacggagagagatcttattttggcagtgtcggcattgtgccttaagtagaaaccagctgaatatagggatgttatcatgccatttcagtgagtgatgacaatgtgggcaatacgagcgaggtatacacaagttgaattcatggtgcttattattcttgagcataattggtagtcgatgaatgacgacattaagaaaactaccgatacataggccaagtattactagactaccccaccatagtggagtaaaggtttgtaagctataaagcatatctaacataagtgaaatactctaatgtcgtggattaataaatttggtgtatatctgtatgggctgataaataaaatacagaaataacaaaggcaccattagcgatttaatgcatataaattattctaattgctgatgcctttctcttatttttgactcaaatgtcattaattagttattgggtggcgacaggcttatttgtatagaagttaagataaatgtgagtattcatactatgtatgatagctagaggaatttagttctatggtgccaaattgaaaatattatgatatgtgatgaggtaattaatattattgcgggtatagttattaatatactgtgtttttttagaaaaagttgatttttactatggtaaagttaattgaaaacatgtcaattagtatgctaatagttaatatttagagtaaatatttgttggtttttatcaataaaatatttttatgaataaggctgatgatagctaaaaatttttttgtttcgttaccgtaaaataaagcccgacagatttctgccgggcgataatagtcaatctacctgtggctaatcattagccgcagcgattacatttagatgtttgaataatctggaagaaatcattgcctttatcatcgaccagaataaaagcagggaaatcttcaacttcaattttccagatggcttccatgcctaactctggatactccacacattccagacttttaatactgttttgcgccaataccgccgctggaccaccaatactgccgaggtagaagccgccgtgcttatggcaggcttccgttacctgtttactgcggttgcctttggcgagcatgatcatactgccgccgtgggattgcagtagatccacataggaatccattcggcctgcggtggttggtcctagggaaccagaggcataaccttccggtgtttttgcagggcctgcgtaatagatcgggtgatctttgacatattgcggcaatccctctccatttttcagacgttcttctaattttgcgtgggcaatatcacggccaacaataattgtgccgctcagagataggcgcgtagataccggatactgtgacagctcttttaggatctctttcatcggccggttcagatcgatttttacgactttaccttccgtggcctgacgtaaatgctcggggatatattgccctgggttatgttccagtttttccagccagatgcccttacggttaattttgcctttaatattgcgatcggcggaacaagaaacccccattcctaccgggcaagatgcgccgtggcgtggcaagcggattacacgtacatcatgggcaaaatatttgccaccgaactgcgcgcctaaccctaattcctgagcttctttcagtaattcttcttccagttgaatatcgcggaaagcttgcccatgctcgttaccttcggttggcaaaccatcgtaatatttggtggaagccagttttaccgtcttcagcgtgctttccgcagaggtgccgccgatgacaaacgcgatatggtatggcgggcaggcggcggtacccaaagtgcgcattttctcaactaggaaggctttgagtttgccgggagataatagcgctttagtttcctgatacagataggttttgttcgctgaacccccacccttggtgacgaacaggaatttataatcttccccttctgtgctgtacaggtcgatttgcgcaggcagattgctgccggtattgacctctttatacatgtccagcgcggcgttttgcgagtaacgtaagttatcttcaataaaggtgttgtataccccacgggacaaggcttctgcatcattaccgccggtccagacgcgttggccttttttccctacgataatcgctgtgccggtatcttgacaggttggcaaaatacctttggctgcgatttccgagttacgcaggaattgcagagcaacatacttatcgttttcactggcttcaggatcgtcaagaattgcggcgacttgcttttgatgggcagggcggagtaaaaacgatgcatcgtggaaagcttgttgggcgagtaaggtgagggcttctggttcgactttgagaatatcatgatcttcaaactgcgagacggagacatgattattgctgaccagataatactcggtatcatcttcctttaaagggaaggggtcttgatagtggaacggtttattagacattttctctcacttgcaacatcagttatcgaaactaaggtagatcaagccggtatattttttttaagtagcctttggctccgatcctactatatgtggcgtcagctaagcgatgacgccatctcttttataggggatagatcgcattttccgtatgtatctatgacgtaaccagaaataatctgtcgttgctttaaatcacagtggattatttcttatttttgaaaaaagtcattacaccgccgacaaccaaccccagcacaataccggtcaaaatccactcggttaatgtcatttacatttccttttttattaatttgcaggtgttatttttaaatttttattggttttgtttgcctctcatcagcaataaaccaataaaaatagcctgccgtaacaggctttttaaacgatgttaaggatgctgtgtctggacggtttctacgccatccggttctaccgcctctaacggaggcataatatcttgaatcatctgctcgtcaaaactagggttaagagccggtgaaaggggagaactgaccagactatcgggtattgcaatatgaggcacaggtgcgtcattcacaaagtctgattcatcctgtttcaccgtgcgactgagagaaaccagcgccacgccgcataaagcaaagaaagcatatagaatattgccccctaaaggcgcaatcagcgcaccgaccgccagtgggccgatgctggctcctacgccaaatgacatcagtaaacaggctgccagagagacgcgtctttcaggttcaatcagatcgttagccagcgcgacgactaatgggtaaagggtaaattgcaacatgctaacgatgaatcctagccctagtaacagacgaaaaggaatatgcggccagatagccagcggcagcgcggtaacggcaagtaatatggcattgatacgaatcaataaggttcggttataacgatcggataaccagctcaagggaagctgagccaccagtccagcaaaaattgacagtgccatgaacagacccgtttgctcggttgtcagcgattgcaggctggaataaaccggagcaagcccgtaaaaagaaccgacaatcatgccaataaccaaggttgaggctagaattttcgggatagaatggataaagaatttcaattccattggtgctggtgacatttgctgggcattactacgggttgtcaatgcgataggaaccaggcaaagagcgaagaataaagcgatcaccatcaatgtgctgaggcccaaattgggctgtagcatcagaactacctggcctagcgccataccggcgtaggtagctgccatataaaaaccgaataccgtaccacgttgattcgaggatgactgatcgttcagccagctttctagtaccataaactggcacatcatacacaggccgataattagccttagtatgacccatacgggtatatattctgttaatccgtggctcaatactgccgcggtaatgataccggcgcaggcgacataggcgcgaatatgcccgactctggcgataagaaaatgaccgaccttaccgccgataactaatccgatgtagttagcggcaataatggccccaatcagggctccggacacgttaatagatgttaaacgcagtgagatataggtcgtcagcaggccagaacccaacaacatgagcaccgtcgcggtgtaaagtgggaagaatgcgttcagaatttttttcactatagcgtcctggttttttatcctgaaatgatcgtcggcgtacaggcctaaaagtcggacgtaaaaacagtcagataaagaaattacgtcacgccagcctgctcgggtattacctctctgcaatcaattagatgatttataagcttctttgatattaccagctaagcatgataggtaaagcgttgtccggacaagggctttgaattcgacatgcgaaacgcttcgcatctattggcagaagtgcagcacaaacgaagagaagtgctactatcgccactgaaatattttcatagaataagggggcatgatgaacgaacaacaactgcgtcagctcagcattgacgccggtgagttgctcaaggctcgcggggccagcgtgacctgcgctgaatcttgcaccggcggatggatagcgaaagccttgacggatatcgccggtagctcggcttatttcgatcgcggatttgtgacttacagtaatgaagcaaaacacgatttgctcggcgtagcggaaaccaccctgaatgcgcatggtgcagtcagcgaagaggtcgtgcgtgagatggccgtgggggcattacacgcggcgcaggctgattttgcactctccgttagtgggattgcagggcctgacggcggtactgaatttaagcccgtaggtaccgtctggttcggttttgcaacaaaggctggacagatctcggctgagaagcatgtttttaatggtaatcgcgatgagatacgcttgcaggccactattttcgcgcttcagacgctggttgataaatttctaaaaaaataggcttgatactgtatgattgtacagtataattagcgctaatttcctgcacaaaacaacattcagtggcgacgataagggcgaccttaccttgccagagagggagtaaaaatggctattgatgagaacaaacaaaaggcattagcagcagcactgggccagattgaaaaacaattcggcaaaggcgctattatgcgtcttggcgaagaccgctcaatggatgttgaaacgatttctaccggctcattatcattagatatcgctctgggagccggcggtttgcctatggggcgtattgttgagatctatggccctgaatcgtcaggtaaaactacgctgacgctgcaggtcatcgccgcagcgcagcgcgaaggtaaaacctgtgcctttattgatgccgagcacgcccttgacccaatttacgcgaaaaaactaggcgtagatatcgataatcttctgtgttctcagccagataccggtgagcaagcgttggaaatctgcgatgcgttgactcgttcaggtgcggttgatgtgatcatcgttgactccgtagccgctctgacgccaaaagctgaaattgaaggtgaaattggcgattctcacatgggtcttgctgctcgtatgatgagccaggctatgcgtaagctggcgggtaacctgaaaaatgccaacactttgctgatctttatcaaccagattcgtatgaaaattggtgtgatgttcggtaacccggaaaccactaccggtggtaacgccctgaagttctatgcttccgttcgtttggatattcgccgcatcggtgcggtgaaagaaggcgatgtggtagtgggcagcgaaactcgtgtcaaagtggttaaaaacaaaattgctgcgccgttcaaacaggctgaattccagattctttacggtgaaggcattaacatcaacggtgagttggtggatctgggtgttaaacataagctgattgagaaagccggtgcatggtatagctacaacggtgacaaaatcggtcaaggtaaagctaacgccagtaattatttgaaagaaaacccagctattgcaacagagatcgataagaagctgcgtgaaatgttgctgagcggtgctggtgaacaatcgactgcggcagccggtggttttgccgatgaagccaacgatgagactagcgaagaattttaataggctgaagtgatagccgtatagtcatattaatcctatgacctggcaaaatatcaacccgataagttttgtattgcggtaacgcagcaattagaccaattctggactgagttaactcagtttctggaagcggtgagaatgttagcgctgtcactgccgcaactcgaaatgtaaggggatgggattctctacttgtgattaaaagtaatgaatgacctgttaagccgcgcgatgagattgctctctcaacgagatcatagtgagaccgaactgcgccgcaaacttgcggcgcagtcattttcggtaaaaggcaattggggacgcggaaagaaaaaatccccatctaccactaaacggggtcaaagcctgaataacggcggtggcgataatcacgacgatcgaagcgctaaaaatagcttttatcatcacagctatagttctggtggtagccgcaacgaagaaaaagaggctgacaacgatctccatgatctcactgacggtcatgacgcggctgaggctattgacccaaaagctattgatgaagtcattgcttattgctatcaacacaactggctggatgatgctcgttttgctaccagttatatcaacagccgtagccgcaaagggtatggtgttcagcgcattcgctctgaactgttgcagaaaggcatagaaaaagaacaagcacaaactgcttttgaaataagtgagatcgactggtgtcagctggcaaaagaagtcgctcagcgcaaattcggtgaaaccttacctgttgaatggaaggaaaaggcaaaagttcagcgttatctcctctatcgtggcttctttcaagaagaaattcagtcgatttacaatgattttatcgaatgaatgcacacgggattttacttccctctgaagaaaatttatcttattcccactttttgtttgtgagctgactggtagtcccctttattaaggggggcgctgttggctcgcgagccattcttttagcttgattccgggacaattatgagcaagagcaccgctgagatccgtcaagcgtttctcgatttcttccatagcaagggacaccaggttgtatcaagcagctcattggtccctaataatgacccgacattgttgtttaccaatgccgggatgaaccagttcaaagatgttttcttgggcttggacaagcgggcctatactcgcgccacgacttcccaacgctgtgttcgcgccggtggtaagcataacgatctggaaaacgtcggttataccgcacgtcatcacacgttctttgaaatgttgggtaacttcagctttggcgattacttcaaacatgatgcgattaacttcgcatgggaactgctgaccagcgaaaaatggttcaacctgccgaaagaaaaactgtgggttaccgtttacgaaaccgatgacgaagcctataacatttgggcaaatgacgttggcgtaccgcgtgaacgtatcatccgtatcggcgacaaaggcgcgccttttgcctcggataacttctggcaaatgggtgacaccggcccgtgcggcccgtgcagcgagatcttctacgatcacggcgaccatatctggggtggccctccaggctcaccagaagaagatggcgatcgctacatcgagatctggaacatcgttttcatgcaattcaaccgtcagtcagatggcacaatgttgccgctgcctaaaccatccgtagataccggtatggggttggagcgtattgccgctgtattgcagcacgtgaatactaactatgaaatcgatttgttccgcgatttgattgcggccgttgccgaagtaactggcgctaccgatcttaatagcaaatcactgcgcgtgattgccgatcatatccgctcatgtgcgttcctgatttcagacggtgttattccttcgaatgaaaaccgtggttatgtgctgcgtcgcatcattcgtcgtgctattcgccatggaaatattctgggtgccaaagataccttcttctacaaactggtagcgccattgattgccgttatgggttcagccgctgatgaattgaaacagcagcaggcgatggttgagcaggttctgaaaactgaagaagagcagtttgcacggactctggaacgtggtctggcattgctggatgaagagttgaacaagctgaccggcgacacgctggacggtgaaactgcattccgtctgtatgatacttatggtttcccggttgatttgaccgcggacgtgtgccgtgagcgcaatctgaaggttgatgaggctggttttgagcaggcaatggaagctcaacgccgtcgtgctcgtgaatccagcggttttggtgctgactataacagcctgatccgcgtcgataccgcgagtgaattctctggctatgaccatgtagagcagaaatctaccgttactgcattgttccgcaatggtgaagccgttgacgagattcatgccggtgaagatgccgtggtgatcttgaatcagactccgttctacggtgagtcaggcggtcaggttggcgaccaaggccaactgaaaagcgctatggctgattttatggtctccgacacgcagaaatacggccaggcgattggccacttaggccagttatctcaaggtactttgcgtattaacgatagcgttgatgctattgtagatagcgctcgccgtaatcgtattcgtctgaaccattccgcgacccacttgttgcacgctgcattgcgtaaaatactgggtgagcatgtggctcagaaaggctcattggttaacgataaatacctgcgttttgacttctctcattttgaagccatgaagccggaacaaattcgtcaggttgaagacctggtgaatgcgcagattcgccgcaacctgccaattcaaacggaagttatggagttggacgcagcgaaagaaaaaggcgcaatggctctgttcggcgagaaatatgacgatcaggtgcgcgtattgaccatgggcgacttctcaaccgaactttgcggcggtattcacgccaatcgtaccggtgatattggtctgttccgtattctggctgaatcaggcacggcagcaggtattcgtcgtatcgaagccgtaacgggggaaggtgctattgccttgctgcatcagcaaagtgatctgttacaggatgttgctcacctggtgaagggggatagcaataatctgacagataagattcgggccgtattggatcgcagcaaagcgttggaaagagaattacagcagttgaaagaccagcaggcagcgcaggagagtgcttcattgtcctcctctgcgaaagaagtgaagggcgtaaaactgttggttagcaaactggataacgttgaagcgaaaatgctgcgtaccatggttgacgatctgaagaatcagttgggctctgccattattgttctggcaacgaccgcggacgataaagtgagcctgattgtaggcgtgaccaaagatttgaccaaccgagtcaaagcaggtgagttgattgccgatattgcccagcaggtggggggtaaaggcggtggacgccctgatatggctcaggctggaggttcggatgttcaggctctgcccgccgcgctggctagcgtagaagcgtgggtcgcgtctcggctgtaagcatgcaatgatcgtgtaaaataaatgcgccatacctcaaagaagagtatggcgcttttcaattttcttgtcataggtcggttacaaagttaaacgcaaatttgttcgtgtcgtctaaacttgtattagttagaggcgcgaccaagctacttacattttatgtgggggcgatggcttacgttttcacggtgtatgatggataatggcggggaaactgagagacccgactcttttaatttttcaaggagcaaagaatgcttattctgactcgtcgagttggtgaaacactcatgattggcgatgaggttacggttactgtattaggagttaaaggcaaccaggttcgaattggtgtgaatgctccgaaagaagtttctgttcaccgtgaagaaatctaccaacgtattcaagcagagaagtctcaaccgacgacttactgatattgaagcagcgtctcgtggaatgcgagacgctgctgctctcccccaaattctattccctgcatcatttctcactcgctcatggctattttctcgcttttctcccaagatttaactcgcctcagtaatattccttcaattcttttacaacgctatttcgcagacatccttatctcgcctgttgataaaatactcttttcgatgccaaattgcgcatcttggctgtgaattgtgcaagtaaacgtttgttgggaaaaattgtttgacttataagtgcaggaaagtaatatgtgcgccacgcagtgccgatgagcttctttaaaagcaagttaggcacaattcgaaagaagcgtatggtgaggtggccgagaggctgaaggcgctcccctgctaagggagtatacggtcaaaagctgtatcgagggttcgaatccctccctcaccgccatttactatgcacccatagctcagctggatagagtactcggctacgaaccgagcggtcggaagttcgaatcttcctgggtgcaccatattttgcagtatggtgaagtagttaaatgactgtcagatagtttcagagatttatttgcacccatagctcagctggatagagtactcggctacgaaccgagcggtcggaagttcgaatcttcctgggtgcaccatctttgttgttatagtttcactcggtgaaacgcttcgcagtaaaaaatcaaacgcacccatagctcagctggatagagtactcggctacgaaccgagcggtcggaagttcgaatcttcctgggtgcaccattttaagaaacctcgctgcggcggggttttctgctttctggctatttgaaatagcatcctgcctgatttggtcagtgagaccccgcgagtgccagtagaacgccactgacttctttttttccgctatctgaatttcgcctgcctatgaaaaatatcaagatgggtcgatgaggttataaatattcatcaaatctatatctcatcacagtgcttgtactggctaatgaattcccatccagttgattttattacgctcatctaatgaccatctttagccaaaaaacactttttctgattaaatacagatggttatacagtaagcgacaatttaatgagtttgcgataaagtagcttttcctttcctcaatgatcctgggataaagatgtacgatcgctatgaaggcctaatctttgatatggatggtacgattttggataccgaatccacccatcgacaggcttggcggaaggtgttgatgcctcacggtattcaatttgatgagcaagctatggtggcgctcaacggctctccaacctggcgaattgccgagatgattattcataatcatcggttgaagttagatcctcatctgttagccgctgagaaaacggcagcggtgaaggcgatgctgttggataacgtaaagccgctcccgctcattgacgtggttaaggcttatcatggccgcagacctatggctgtgggaaccggaagcgagcacagcatggctgaggcgcttttacgacatcttggccttcgggattacttcgatgtcatcgtcggtgccgatgacgttacccggcataagccggagccagacacctttttgcgctgtgccgaattgctcggcgtggcgccggagcgctgtgtcgtgttcgaagatgctgatttcggcgtagaagcggcaaagcgggcgaagatggacgtggtggatgtgcgtctgctgtgagtagcacgctggctgtagcatcgttattcggtagcagttttcttagcgcgacgctcttacctggaagttccgaaattctattagtgaccttgctaactgcgggcagtgcgcctgcggtgatattagtgttatctgcaaccgtaggtaatacgctgggtggcttaacaaatgtagttataggccgcctgttaccggcgttaaaaccgcagcgcgggctggatatgacgttgggctggctccaacgctttggtccagccgctctcttgctgagttggttaccggtggtaggcgatttgatgtgtgtgttggcaggctggctgcgtatgccctgggctctggtggttttttttctgtgtgtgggaaaagctgtgcgttacatcgttattaccgtgttaacgctggaaggaatcgcctggtggcaataaagatgtgatgacttcacatagtcacattgacgtagtttcagtatgcttacgggctatggtttttaagagcgggaggtcgatttgatcccggacgtatcacaggcgctttcttggttggaagcgcatcctaatgcattaaaaggaatccgccgcggcattgagcgggaaacattgcgtgtgaccgctgatggccaactggctgcgacgggtcaccctgagtcactcggggcggcgttgacacatcaatggatcacgactgattttgccgaagctttgctggagtttatcactccggtagacggcgatatcgatcatttgctggcttttttgcgtgatattcatcgttacactgcgcgtaaacttggcgatgagcgcatgtggccccttagcatgccgtgctttatcggcgccgagcaggatatcgaactggctaaatacggttcctccaacgttggacgcttcaagacgctgtaccgtgaagggttgaaaaaccgctatggcgcgctgatgcaaaccatttccggcgtacattacaacttctcactgcctattgagttttggcaggcgtgggcgggtgtggaagacgagcaaagtggtaaagaagagatctctgccggttatttccgactgatccgtaactactatcgctttggctgggtgattccgtatctgtttggtgcttcgccagcgatttgctcttcattcctgcaaggacgtgagaccgcattgccttttgagcgcaatgataacggtatgtgctatttaccttatgccacttctttacgcctgagcgatttgggttacaccaataaatcacagagtaatttaggcattacttttaatgacctgaatacctatattgatggattgaagcgtgctatccatacgccatcggaagagtatgcggcgctggggctgaaagagggcgatcgctacctacagctcaatagcaatgtactgcaaatcgaaaatgagctgtatgctccgattcgacccaaacgcgtcactcaatcaggtgagtcaccttctgacgcgttgctgcgcggcgggatcgaatatatcgaagtgcgctcgctggatatcaatccgttctccccaattggtgttgatgcggtacaggctcgtttcctcgatctatttctgatctggtgcgtgctggctgatgcgcctgaaatgagcagcgatgagctactttgtacgcgtaaaaactggaatcgtgtgattctggaagggcgtaaaccgggtcagactattggtattggctgcgatagcactcgtgagcctttagataaagtcggtaaagcgctgtttgacgacttgcgccgggtggcagaagtgctggacggcaaagacagtcgggcttatcaggatgtatgtgatgagctagttgcttccttcgataatccggaactgacgttctctgctcgtattttacaggcaatgaaagcggaaggaatcggtggtgtcgggctggatctggctgaacgttatcgcgaaatgttacgcagtgagccgttggaaatattgactgaagaacagctttcagctgaacgtgaccgttcttggattcgtcaaggtgagctggaacgtagtgatgaactaagctttgaagagtatctggcgatacacgcaggtcgctagaaaaagaaaaggccacaatcaatgtggccaaattaacatctctgtatacagggatgatgataacaaatgcgcgtctttcacatattaagacggcggtgatttaaaaaagtttcattgggttcgaaaaaaaattcttctgcgagaaataattttttttgaggaggtaacaagatgccattattggacagttttacagttgaccacaccattatgaaagcaccggccgttcgcgttgctaagacgatgaaaacccctcacggcgatgcaatcaccgtgtttgatttacgtttctgcgtgccgaataaagaagttttgccggagaaaggtattcatacgctggagcatttattcgcaggttttatgcgtgatcatctgaatggtcagggtgtggaaattattgatatctcaccaatgggctgccgtaccggtttctatatgagcctgattggcacacctgacgagcagcgtgtggcggaagcgtggaaagcggcgatggctgatgtactgaaagtcactgaccagcgtaaaattcctgagctgaatgaatatcagtgtgggacttaccaaatgcattcgctggaagaagcgcaggacattgccaaaagcatcatcgagcgtggtgtgcgggtaaatcataacgatgagttggcattaccgaaagagaaactgactgaactgcacatctagcatcgttgatatgttggaaaataaatatcctccggcatagccggaggtttttcatatgcgcctataaggctctgttgccagccgcgccctaacaggcgcatcgcgatctgacatttgcatttatggattacttacggcccgtaaacgggctgcccggataggggatcgagagttgctcacccattttatcctcttccaactggtgctttatgtattcttgtatcctggctgtatttttcccaaccgtatcaacgtaataccctcgacaccagaactccctgttacggtatttgaacttcaaatcgccaaactgctcataaagcatcaggctgctctttcctttcaggtatcccataaaacccgacacactcattttgggcgggatttccagaagcatatggatgtgatccacacagcattctgcttccagaatattcacgtttttccattcgcacagctttcttaagatactgcctatcgctttgcgcttttccccgtagaacacctttcttcggtacttcggcgcaaaaaccatgtgatatctacagttccatcgcgtgtgcgctaagctcttttcgtccctcatagggacccccttttgatttcttgttgaacatttgcagttgccagaccgcaaactgttttaacaaatcaaaggggtttttataactggctcaaagctgaaagctttaccgaacctccagcctggctggaggttttctgtgcacaacaaaaaaagacgcgagagcgtcttttttattgggcgcgtatttatcgcgcgcgagttgctcgatctgcggctattactgcggattaagcggtgaatgcggatgatcgatcggggtaactctgacctgtttaatcatattgtcctgtacgtccaatacttcgatttcgtaatggccgatgcgcacttgagcgttaatctcaggaatatcttctagggtttcaagcagcatgccattaatggtgcgggcgtcgaccggcagcgaccagttaaaggccttattcagttcccggacattggcggtgccgtcgataattaccgagccatcgctttgtggattcacttcttccgccaacgtaggggacattgacgtagtgaaatctccgacaatctcttccagaatatcttctaccgtaaccagtccttgaatatcgccgtattcatcgacaatcatgccgactttttctttattgcgctggaatttgaccagttgaacgttcagcggtgtgccttctggaataaagtagatttcatccgccgcgcgcagcaggttttctttgttgaactcttttttctcggtcatcagccggtaggcttcacgcactcgtagcatcccaatcgcgtcatccagcgattggcgatacagcacaattcgaccgtgaggggaatgagttaactggcgcataatggacttccaatcatcattgatatcaataccaaccacttcattgcgcggcaccataatgtcgctgactgtgactttttccagatccagcaccgagatcaacatgtcctgattacgacgggaaatttgtgagtgtgattcattcacgatactgcgtaattcgtctttactcactgcatcactgacgtgcacattgcctttgataccgcacaggcgcatcaacaggcgggtaatgctgttcagtaaccagaccagcggcagcatgatcttctgcaaaggagccaatagcatgctgctagggaaggcgacgcgctctggatagagcgcagcgatggttttcggcatcacttcagcaaaaatcagcaccacaaaggtcaatacgccagtggcaactgccacgcctgcgttaccgtacagtcgaattccaactatggtggccagcgccgatgcgagaatgttaaccagattattgccgataagaaccaggctaatcagacgatccgggcggcgtaatagtttttccacgcggcgggcagaacggtttccttgcttggccaaatggcgcaggcggtagcggtttagcgtcatcatgccggtttctgaggcggagaagtaagccgataccacgaccataatgatcagaatgatgataagtgtactggtagagacctggtccaacgcaatattccttatagcgatagatgaaggctccagtcagggtaacaggagccataggttgggcgggggagtgtcgttagccgatcatgatctcttgcagcaggcggctgccgaaataggctagagtcagtaagaatgctccggcaaagctgaaccagaccacgcggcggccgcgccacccttcgtgataatgaccccacaatagaataatgtagacaaaccacgccataatcgacagcacggctttatggacattctctttgctgaacaaattatccatatataacaaaccggtgcagagcgttagcgtcagcagcactacgccaatttgcgtaatgtgaaacatttttcgctcaatgctcatcagtggcggcatatcggcggtgaatgtcagttttttattcttcagtagataatccagccaagctagctgcatggcgtacaatgcggcaataatcagcgtggcataacccaatagcgccagcccaatatggataaataacgccgggctgccttccagatgggtaatgaattcgcctggcatcagactggcgagagccaaattgatcatggcaaagctgtaaacgattggcagcaggaaccagccgcgcccacgagaggccacgaatgtcatgattgagcagatcatcaaaccgacaatagagccgatattcagcaaagtcaggttttgaccctcgccaacatcaaatatttgatgtttcaatgcgataccatggcaaaccagcgctactacggcagaaaccagggctagccgtcggtaagcgctgctcttcctcaccaaactgggaataatcagtcccagactaagtaaataggcaactagagccaaaatagagaacacgggcatagcggttaataggcatcggctgagtgaattggataaccagtataacgttagcagcgtcatgctccaaccgttctcctacgtgaaggcagagatcgcgcgcgcttcgtgttataatcccgccattgtgtcgcccgggcggcctgtttccacgttgagcatgagacgatgtttgagaacttaaccgatcgattatcgcgcacactgcgcaatatcagcggccgtggccggctgacagaagaaaatattaaagaaaccctgcgtgaagtccgcatggcattgcttgaggccgacgttgccttgccggtggttcgtgactttatcaaccgggttaaagagcgtgcggttggccatgaggtcaataaaagccttacgccgggccaagaatttgtaaaaattgttaagaatgagctgatcggcgccatgggcgagatcaataacgaactcaatctggcagcccaaccgccggcggtcgttttgatggccggtctgcaaggggcaggtaaaacaaccagcgtagctaagctgggtaagttcctgagagaaaagcagaagaaaaaagtgctggtggtttctgccgacgtttatcgccctgcggcgatcaaacagttggaaacgctggcgcagcaggttggcgttgaattcttcccgtcggacgtgcaggaaaaaccgattgatatcgttaatcgggctttacagcaggcgaaactgaaattctttgatgtgctgatcgtcgatactgccggtcgtttgcacgttgatgaagccatgatggacgaaatcaaacagattcatgccgcgattaatccggtagaaacgctgtttgttgtcgatgccatgaccggtcaggatgctgccaacacggcgaaagcgtttaacgaagcgctgccgttgaccggcgtggtgttgaccaaggtagacggcgatgctcgtggcggtgccgcgctgtcgattcgtcatatcaccggtaagccgattaaattcctcggtgtgggtgagaaaaccgaagcgttggagccattccatccggaccgcgttgcttcacgtattctggggatgggcgacgttctctccctgatcgaagacattgaaagcaaagttgaccgtgcacaggcggaaaaattagcgaccaagctgaagaaaggcgacgggtttgacctgaacgactttctggatcagttaaaacaaatgcgcaatatgggtggcatggccagcatgttgagcaagatgcccggtgcaggccagttgcctgacaacgtgaaatcgcaaatggatgacaaagtgacggtgcggatggaagccatcatcaactcgatgacgctgaaagaacgtgccaagccggaaatcatcaaaggttctcgcaagcgccgtatcgcagcgggttccggtatgcaggttcaggatgtgaaccgcctgctgaaacagttcgatgaaatgcagcgcatgatgaagaaaatgaaaaacggcggtctggccaaaatgatgcgtggcatgaaaggtatgatgccaccgggtttccctggccgttaatgccctcatttgccctgataagcattcaggcgaaaagggttatcaatttcccgccagaaacggcggtaaacgatgaaaattggcctcattataaaagtagcggacaggaatctacgctttagattgctttttgcgccaaaatgagtaaaattttcgggctttttatattgcaactgaaccccgttccccgatggggttcagttgttttattaactaaagaggatgttatggtaacaattcgtttggctcgtggcggcgctaaaaagcgtccgttctatcaagtagtagtgaccgacagccgtaatgctcgtgacggtcgtttcatcgaacgtgtaggcttctttaacccgatcgcatctggtcaggctgaagcactgcgtttggacctggatcgtatcgaacattggatcggcctgggcgcaactgtttctgatcgcgtttctgcgctgatcaaagacgctaagaaagcagcttaatctgtcgcggtggtggttattatgagcaaacaactcaatccagtggttcccgagcagccgattgttcttggcaaaatgggttcaacttacggcattcgcggttggctcagagtattttcatccaccgagaacgccgaaagcatttttgactatcagccgtggtttatccagcaggccggtaagtggcagcacgtcgagttggaagactggaagcgccacagtcaagatttgatcatcaaagtcaaaggtgttgacgatcgggatgctgcgaatctgctaactaattgcgaaattatggtggattcgaaacaattgccagaactagaaggtgatgattactactggaaagaccttatgggctgtcaggtagtaaccacaaccggttacgaactgggtaaaatcatcgatatgatggaaaccggttctaacgatgtcatggtagtcaaagcaaacctgaaagatgcattcggtatgaaggagcggttggtcccgtttcttcatgggcaggttatcaagaatgtcgatctcactgctcaacgtgttgaagtagattgggatcctggtttttgacctctgaattaaacggcaacggcgagtggaacaaaacgatgtggattggtgttatcagcctgtttcctgagatgttccgcgcaataaccgattttggggtaactggccgggcagtaaaaaatggcctgctgagcgtgcagtgttggagtcctcgtgactttacctacgatcggcatcgtaccgtggatgaccgcccatacggcggtggcccgggaatgctgatgatggtgcaaccgttaagggaagccattcatgcagcaaaagcggcggcaggcgagggagcaaaggtgatttatctgtcacctcaaggacgcaaactggaccaacagggtgtctgcgaactggcaaccaaccagaagatgattttggtgtgtggtcggtacgaaggtattgatgagcgcgtaatcaaaaccgaaattgatgaagaatggtcaattggggattacgttctcagcggcggtgagctgccggcaatgacgctgattgattctgtatcccgctttataccgggcgtactgggtcatcaggcctcggctgaggaagattccttcgctgatggattgctggattgcccgcactatacccgtccggaggtgttggaaggcatggaagttccgccagtattactgtcgggcaaccacgctgagattcgtcgctggcgcttaaagcagtcgctgggccgtacctggcttagaagacctgaacttctagaaagcctagctctgactgacgagcaaatggtgttgctggctgagttccgaaaggagcaagaggcctgagcgacagaactatgaaaggaacgtttcgccgcgtgcaaacgatcctgatatatcagtttacctagggtaagagacttattatgagcaatattatcaagcaaatcgaacaagagcagatgaagcaagacgtacctgcattccgtccgggtgattccgtggaagttaaggtatgggtcgttgaaggtgctaaaaaacgtctgcaggcattcgagggcgtggttatcgcaatccgtaaccgcggtctgcactctgcattcactgttcgtaaaatttccaacggcgaaggtgttgagcgtgtattccaaactcactccccagtaatcgacagcattactgttaagcgccgtggtgccgttcgtcaagcgaaactgtactacctgcgtgagcgtactggtaagtctgctcgtatcaaagagcgtcttaaccgtattaactaagatacagctcaggcttcatccaatagttaatagttatcaaggggttggccattggctgacccctttttttatctgtaaagtctctcaaagctcccgtttacttttcttattgatataaactgccattccgtctacctcagttattttattgatattttttgcgcaccgcctcgaataaaccaagtaaaaactttgataataaagctagctctggctaggctgcatctcattcaattgaatgctaaagccaataagaggaagaaaatgctgcaaggaaaaagagctgtggtgaccggtggtgggcgcgattttggtcaggctgtttcagtatggttagcgcgggaaggtgctgaagtcgttttatgcagtcgggttatcgcgcaggcgcaggcaaccgtggatattattcgcgccgaaggtggtattgccgaggcctatgagtgcgatatttccgatatgaattcagtccggcagttttctcacgggttactaaaacatgaaaagccgatagatatcctcttgctaagcgcggctcaatggctggaaggggatttacaaacaggcggtggcgatgaggatattattagcaccattaatgccggtttaacgggctctattttactgaccaaagcgctactaccgaggatgaatagagagcagggcagcgatattatcgcgatggtttctgtctgcggcgtgccgaatttcactcaatctaacgcccatcccgcatttttcgccgctaagcagggttttagcggcttttgccatactatttcccagagcttagctgctgaaaatatccgtttgaccgcgctgtatcccccagattttgaaacccttggttttgacgaagatatttctcatcataatcagacaaaccaacgcttgttaaccggccaatctatttggcaaaccgttaaatttgtcgtgactcagccgcgcagttgccacatcaacgctattcattttcagggaccgagccgcgaaccgttgggataaatggatgagttagttataggaaggagagcgtcagtgaggaaaatcttagcgtgactgcgccacgctaagaatattcagatgattacagaccgtaaaccagcgtgactgaggttgtcgtgtcggtatttttgggggcgctggccggaggcttggtgttgtaggtaacaacgtaagccagacgcagagcaaaactcttattgattgctacgtttaacgcagtttcagagttcagcgtagtctcttcgttggctaaagctgaaacgccttcgctaaacacggtgttatcggtcaactgataggtatagttggtgccagcataggccaaggctttagttgcgcggccaccgcgatagaattcgtcatggcgaacacctggaccgaattccacgcgcagattatgtaaagcgccggtaagaatctgccgaccataaccggttgtgagtacggagcgagaatcgtagccgttataacgatcgttcaaccagctggcttgaccgaacagatagttgcggtcggttagattatagcgagtacgtccacctaactgatagcgctctgaagatcttacctcattggagctggtgtttcttgcggagccccaaaggctataagccgtattgggttggaaccaggtcaacgtggagttggctgtcagggttgagttattagtattccccgattgagcgttataacccgcttcgacattaccgacaaaactgtgtttagcagtagcaggatcatcaagtgcggtaaaaacggtggcatcggcaaaagctgatgcgctgaacatagacactgctaacgtactgaaataaaaaggtaacgccctggtatgacgcaaagagaacataatgcttccatggtaaaaaagaataagattgataatgcggccggcattgtatcaacttgcgatcaaagttattcataagatattgccaatcttcaaataaattataataaacgcatttcacatatgagattattattagcaattattttttatgacaggacgcagggcagaaaagtcggcaataaaccatattttgtctgtgagaattggataaaatatcaggggatagggtaataaatttaattttttggctttatccctcagtgttaattgagtttcctgacttaagttaatttttatgggtggaggggcaatttcttaccccttgatgatttttaaacggattttattacataaaggtatttaccagcagataaccagtcatacaggagcacaccacgccgattaaaccggggatgataaaactatggttaatgataaagcggccaatttttgtcgtaccggagcggtcaaaaccgatgcaagccagatcgctgggataagtcggtaatacaaagtaaccgtaggccgcagggaagaaggcgatcagcattttaggatcgacacctaattgcaaccccataggagcaatagctgccaatgccgccgcctgactgtttaccagcttagaaaccaaaaacagtacaatggcataggtccacggctggctttttaccacgtcttccagtaccagttttaattcccccatatgtgcctggaaaaaagtatcactcatccaggcgacgccgaataccgagaaaatcgctaccatgcccgctttgaataccgcaccgtttgaaatatcgctcggtttaactttacagcccatcagaatcactgcaccggcaattaacatcatcatctgaataaccagattcatagagagcggtttaagtacgcctttaacttcataagccggacgtaaatcgccaaatgcgccgagtaatacgacgatggcgatggcactaaagaatatccaggttgaccagtaagcctgtttcgggaaaacctgattcagcagcgtatcagtgctgccatatatgaaggcacgttgctccggatcttttattcgagcctgaaaatcagggtctttatccaaatctttaccgcggcgtaggctccacagcgctgcggctaacacgcccactaacgaagcgggaacagaaatcgccaaaatttccagtatgctataagcatgcccgatgccgtgagccgcgccaataatagaaaccagagaaactacggccactgataccggcgatgcggtaatggccatttgcgaagcaacggaagcgacggccattgggcgctcgggacggattcctttcttgagggcgatatctgaaataatcgggaacatggtataaaccacatgtccggtgccgcataaaaaggttaatgaccaggttgtgaacggagctaatagcgttatatgttgcggatgccgacgtaataagcgttcggcaaactgcatcatgatatttaatccgccagcggtttgtaatactgaagcacagccaataaccgctaatatcgtcagcatgacatcaaccggtggtttacccggttcaaggccaaatataaaggttaaaataaataagccgatgccactaataaggcctagccccatgcccccaaagcgagtgccgattaataggcacagaataataattgcaaattgcagtgttatcataacgatcccttgtatttttctgtatgaaaaaagcttgttagccaatcctgtttttaaaatgtcatatttttctttgctataaccatcaaagcacagatcgctaaagcaaaaacttggctaatatcaagagagcgcgtcttatttattgaatgaattaaaaccgagaggaagatctgttttttataatttttagtcgagaaaaaagaaaggaataatattggttatccctgatggttattcatgtaaaacgattgttttaatattgttcgatatattgttgggctgggttttaattagctatttaattaatccagatttgctgaagtatttcggcatctttaactgaatcacagctggcagggaaattatcgccccgttcaaagtgaattttcaagcgggcaggctggcaaagatcctgttgcccagcatgataacctgataggtaatagtcgcgattaatgtgtggattgccataccattcggctagagtctcattatctctgacaatcaacccgccctgagcatcactgaatccgatctcataccagctcgtcgggtctttgacttcatcattagggtcaagagaatggctacagccgctaagtaacagcgcaccgatcatcatctgcttatatttcatggtgaagttcttctgcaaccgatttgcgatagctgttttagataatgatatcaggctatgcctaacttctctttaagtggttttagataacgtcggctaaccgggatgtgctttccggtgcgagtgacaacttctgctgaaccgttatccataagctgtatttcgcctagctgttccgtgttcaccatatattgacggtgacagcgaataaaaggcgttttttcttccagcgttttcaacgagagctgggtataacctgattgcaccatgcccacaacgtgcacaccgctaagctctgaactgagatattcgacctcttctattttcaaaagaaagatacgattatgcccggagcagggaatgtgacgcagcatcggttcggtgattttgtgtaaattattatttacagttaggcctcgacgcaggcgaataagtgtcttggccaatcgttgctggtcgaggggttttagcagatagtcgaaagcatgttcttcgaaggcgcggacagcatactcgtcaaaggcagtgacaaacacaatgtggggcatgctctctgggttcagcatgctcgctagctccagtccgttgatgcgaggcatttgaatatcgagaaatacgacatccggctggagccgctgaatcgcggggatagcttctatagcgttactgcattcagcgataacctcaatgtcttgctcttcacttaatcgttcgcgtaaatcttcgcgcgcaggttgttcatcatcaacgatgatcgctctcagcatacttcctccacaaatttttctcattttatcatggtgatttgctgcttggagaaccatctgtacaaactgcgacatcccgcaaaagttagccagattgtgggtgtaaagtttgcggtaattatttatttacagatatggattgaaaagtttacacggcgtgatattgtggaactcagaaacgacaccgcacatgaaacgatactcgcttaacagaggtaggtaggaaatatgatcatgcaaaaagatgcgctcaataacgttcatatcagtgctgaacaaatactgattacgccggaagaactgaagaatcggttcccgttgagtgaaaatgatcaatatgcaattgcttcgtcgcgcaaaaccattgctgatatcgttcaggggcgcgacccgcgtttgttagtggtttgcggtccttgttccattcacgatgtggatgctgcgttggattatgctcgtcgtctgaaactcctctctgctgaattgagcgatagcctgtacatcgttatgcgcgtttattttgaaaaaccaagaactaccgtaggttggaaaggtttgatcaacgatccgtacatggatggttcttttgatatggaagcaggcctgcatattgctcgacgcctgttgctggatttagtgggtatgggattgccattggcgaccgaagcacttgacccaaatagcccgcaatacctcggcgatctgttcagttggtcggccattggtgcccgtaccacggaatcccagactcaccgtgaaatggcatctggcctatctatgcctgtaggttttaaaaacggaactgacggcagcttaggtacggcgattaatgcgatgcgcgccgcatctatgccacatcgttttgttggcattaatcagtctgggcaggtgtgcttgttgcaaactcagggcaacccggacggtcatgtgattctgcgcggcggtaaaacgcctaactacagtgcgcaagatgtggcgcagtgtgaaaaacagatgcaggacgcgggactcactccatccttgatgatagattgcagccatggtaattcgaataaagatttccgtcgccagaccgcagtagctgaatcggttgttgagcagatcaaagcaggtaatcgttcgattatcggtgtgatgctggaaagtcatctgcatgaggggaaccagtcatctgagcaaccgcgggaaacgatgcattacggtgtttccgtgaccgatgcctgcattaactgggaaacaacggaaactctgttacgttcgatgcataaagaattaagcccggcgctggcggcgcggactgtagaggaatagtcgttatggtggctgaattgaccgcattgcgcgatcaaattgatgaagtggataaagcgttgctggacttgctggcgaaacgcctgagtctggtggctgaggtgggcgaagtcaaaagccgctttggtttgccgatttatgtgccggatcgtgagtctgccatgctggcgtcacgccgcaaagaggccgaggcgctgggcgttccccccgatttgattgaagatgttttacgccgggtgatgcgtgagtcatatgccagcgagaatgacaaaggctttaaaaccctgaacccacagctgcgccccgtcgtgattatcggtggtaaagggcagatggggcagttattcggtcggatgttattgctttcgggctatcaggtaaaaacgctggagcaggaagactggccgcaggcggaatcgattctggccgatgcaggaatggtgatcgtcagcgtacctatccatgcaacagaagaagtgattgctagcttacctaagctaccgacagactgcattttgctggatttggcatcggtgaagaatcgtccactgcaatcgatgctggcagcgcatgaagggccggttgttggtctgcatccgatgtttggtccggatgtggggagtctggcgaagcaggtcgtggtgtattgtgatggtcgtcagcctgaagcttaccaatggttattggaacagttgcaggtatggggcgcgcggctgcatcgtatcagcgcggttgaacatgaccagaatatggcctttatccaggcgctacgccactttgccacttttgcctatggtctgcatttggcggaagaaaatgttcagcttgaacagcttttggctctgtcctcgccgatttaccggttggagctggcgatggtcgggcgactgtttgctcaggatccgcagttgtacgcagatattattatgtcgtcggaagataacctggcgctgattaaacgttactaccagcggtttggtgatgcgattaagctattagaacagagtgacaagcaggggtttgtttccagcttccagaaggtggaacattggttcggtgattatgctgaacgcttcctgctggaaagtcgctctttgctgcgccaagcaaatgacaatcggcagtaatcattaatatttatgctgttagccagtaaaaaagtcatcccagacgatcgggatgactttttttatgagcaaaaataggtagcgatcggcgattaacttgggttaaccggcaccacgttttcactcggatagcagcccaacacttttagtgaacgggttagcagcgtcaaatcgctgagcgccttttgcatcgcttcggaacgcaggttagcctgcacatcaatataaaacatttcttcccacggattcccgttgattggccgagattctagcttggtcataatgatgccgtgttctttcaagaccagaagagcttctactaacgcccctgattgttggccagtagccataatcagcgtagttttagctggaatctgctcagaaacatcaatagctttacgcgccagcacgatgaaacgagtgatgttttgctgctgatttgccaaatagtattccagtacctgcaaaccatagagcgcgccaccggcttcgctgcccaatgcggcggcttttggggaatttagctgtgcgactttttccattgcggcggcggtgctttcgcaatattcgattttccagtgcgggaaacggttaatgaactgactacattgttggaaaggctgcgggtggctgtaaaccgtttcaatctgacttaaatcggtctccgcagccgtcagaatgcagtgctcgatcgggttggttaattctccgactatcgacaggctagtatgttgcagcagatcgtaaacatcattgatagagcctgaactggtgttttcgatcggtaaaatcgcgtaatccgcctgaccggtttctacttgagtaaagatatcctggaatttcaggcagccgcattcgatcaggttatcaaaatgacgggcggcgtattgacgtgcggccaaatgagagtaagaaccttttgggccaagaaatgcgatgcgcgctgaatgagcggtagtttggttcaactggtgttgcagcaatgtctgttgggtcaatactgagtcttcaataatcagctggaacagacgggtgatataaaatccgtcgagatcgtaaggtttagcagcagtaatcaaagcctgcagtaaatccttctcacgttctttatcacggatcggacgatggctgtgttgcttggctcgagccacttcgattgccaactcgcggcgttctgccagtaacgccaacagctttaagtctaaagcgctgatacgttctcgtagcaccagtaacggattgtctgtcatagggtcagccttattatttttgccaaatgatttatgcataaaaaaagcctcccggttgggaggcttgtttgttcgtcttcgcattctttatcacacgacgaaacgcctcccaatcaggggaaggtaaaaaagaatgcgaagaaaaacggtttgtagctcatgtgatggttgatggcctaatagtcgcgaatggagttaacttaactgccgccagttatggcgtcaataaaaaacgcgcccgaaggcgcgttagatcctcaataagatggttaacccgttactcttcttgctcaggctcctctatcagattgacatttttgatactagcggcggtacgttttgcctcacctttgtgctgaactttgtttagttgtcgttctaatttcgcgatcagctcgttgattgcggcatacatatcatcgtgcttggcactggctaccagagggccgtttggcgtacctatggtcgcatcaacaacaaatccttcagggtctttagacagcacgatatgcggatttattagctgagcttgccacttatccagtttggttagacggtcttcaacatgcttacgaattgcaggggtgatatccatttgtttgctagtaatattgactgcggtcatatggcttacctcgttgtcttctccgtcttggataacttcagcatacctctcttttcggtaaatagaatgatctaaatcacattttcttgtcactttttgcaaaggcgacctgaactgtgagccagtattaggaaagtgatttaagagcttgaatcatcggaaaaaatgtcgcaatatcgataagatcggccagcgatattggagccgaaattctgcttttacccctctccctcaatggcttagtccccccttaacctttcagatccagagcgggtcgggttttgtatgctacccgtgactcaaattaccgcgcaggtttccctatattgggaaccgggagaaagtacgttttacagattaaggaaaggagggcgttcaattttgcgactaacagaaacaaaaacggcagccgaagctaccgttgttttgtctcattggctcacgccagtgtagccatcccactatgcagggttggctgcaatcactttactgactttatctgcctgcgcattcaactgaatttgcttgtaggcattttccattaacggcagtgcatcgcgagtcgctttggtgtctgggtaattgcgcatcatttgctcaacacggttaattaccgcaacgtaagcaccgcgcttagtgtagtatttagcaacggccagttcatgcttggccagtcgatctttcaagaacaccaggcgtttttgggcatccgtagcatactgactgttcggatagctttgaattaactggttaaaatcgcggaaagcagctcttgcatgctgagggtcgcggtctgaacggtcaatcccgaagaagccttgtaatgcactgtcatccagagccatgtcagtcagaccacgcatatataatacgtaatcaatgttaggatgtgtgggattgaggcgcataaagcgatcgatcgaggcctgagccagcggcaaatcggcagatttataataagcataaatcaaatccaactgcacttgctgggagtaaggcccgaaaggatagcgattatctaacgcttctagttgcgtaatagctcccttaaagttaccgtcctgcagtttttgctgcgcggtagcatagagctcagaaggcgggttgtcgggaaccacgtccttgttactggagcaaccggtcagcaccaggctcaacgtggcggcagccaccagatatttcatacgcgtcatgacgttttgattatcctcgaagtgttattccgggagactgtccgttaagctcccgacaaagatctagatacaatagcacattatattaaacggcatcgccgtcaaaacccaacgttaacgaagaagctgcatatggcacaacaagtacaactcagcgcaacggtggccgaatctcaactcggtcaacgtttagatcaggctttggccgaattgttccctgattattcacgatctcgcataaaagagtggattttggataatagggtctcggtcgatggtaagacaattaataagccaaaagaaaaagtgttgggtggcgagatcgtcgcgattgacgctcaaatagaagaagaagcccgctgggagccgcaggaaatcccattggatatcgtgtacgaagatagcgatattctggttatcaacaaaccgcgcggcttggtggtacaccccggtgcaggtaatcctgatggcacggtattaaatgcgttattgcattattaccctgaaatcgtggatgttccccgcgctggcatcgttcatcgtctggataaagacaccacaggtttgatggtcgtggcgaaaaccgtcccggctcagactcgtttggttgaagcgcttcaggcgcgcgaaatcactcgtgaatacgaagccgttgccattggtaaaatgacggcgggcggtctggttgatgagccgatttctcgtcactcgaccaaacgcactcacatggcggttcaccctatgggtaaacctgcggtgactcattaccgcattatggaacatttccgcgcgcatactcgcttgcgtctgcgtctggaaacgggccgtactcaccagatccgcgtgcatatgtcgcatattaaccatccgctggtgggcgatcagctttacggtggccgtccgcgtccgccaagaggcgcatcggataatttcattgccgtgctgcgtggtttcgatcgtcaggcactgcatgccaccatgctgcgtttgtatcatccaatcagtggcgttcagatggaatggcatgccgctctgccggaagacatgattgagctgatcaccgctttgaaagccgatactttagaatttaaagatcagatggattggtaatgaagccgctgattctgccgcaatggccacagccagccagcgttaagtcgtgcagcaccacccgcagcggtggtgttagcgtgccgccttatgattctctgaatttaggggcgcacgtaggcgataacccggcggatgtggagcagaatcgccagcaattaattacgctggcggcgctgccacaggctccgcaatggctggaacaggtgcatggcacgcgagttttacgcctgaacggcgagcccatcgcggatatccaggccgatgcggtatacagcaacgtgcctgggcaggtttgcgcggtgatgactgccgactgtctgccggtcttgttctgttcgctgacgggagacgaagttgcggcggctcatgccggctggcgtggcttatgtgccggcgttcttgaacagactttggcagaattcagcgcaaaaccttcttctattattgcctggttaggcccggcgattgggcctcggcaatttgaagtgggagcagaagtaaaacaggcattcgttagcgcagacccccaagctgcgctggcgtttactccgtttggtgacaaatatctggcagatatttacctgctagcccgccagcggctggcgtcagcgggtatccacgaagtgtacggtggcgacctttgtacagtgagtgatgagcaacaatttttctcttatcgacgcgaaggaatcaccggccgcttggcaagtttaatctggttgatctaacctattgaattaggacgatccaatgacgcataccacaaaactcaaatatattggctaaaataaccttgaaaagctgagggatgacctcatctaatctccagtagcaattttgaccagtattggaggtgttatgcgtctggatcgtcttaccagtaaattccagcttgccctcgccgatgcccagtctttagcccttgggcgcgacaaccagtttattgaaccgttacatttgatgagcgctttgctcactcaggatgggggcacggttcgcccattgttaacctctgccggtatcgatgttgcgcgtttgcgcacggaaatcgatcaggctttgggacgcttgccgcaggttgaaggtaccggcggcgatgttcagccatcccacgaattagtgcgggtactcaatctttgcgacaaactggcgcaaaagcgcgcagataaatttatttcttcagaattatttgttctggcggtgctcgaagatcgcggttcgttgaccgatctattgaaagccgcaggtgcaacaaccgataaaatcagcaaggcaatcgaacaaatgcgtggtggagaaaccgttgatgacgccggtgcggaagatcagcgccaggcattgaaaaaatacaccattgacctgaccgagcgcgcggagtccggcaaactcgatccggttattggccgtgatgaagaaattcgtcgcaccattcaggtattacagcgtcgtaccaagaacaacccggtactgattggtgagccaggggtgggtaaaaccgccattgtggaaggtttggctcagcgaattgtcaacggtgaagtgccggaaggtttgaaacacaaacgcgtgctttcattagatatgggcgcgttgattgccggtgctaagtatcgcggtgagtttgaagaacggctaaaaggcgtattgaacgacctggccaagcaggaaggtagcgtcattctgtttattgacgagttgcacaccatggtcggcgcaggtaaaggcgacggtgcaatggatgcaggcaacatgctgaaacctgcgttggctcgtggtgaattgcactgcgtaggtgctactacgctggatgaatatcgtcagtatatagaaaaggatgcggcgttagagcgtcgattccagaaagtatttgtagcagaaccgacggtagaagacaccattgccatcttgcgtgggctgaaagagcgttatgaattgcaccatcatgtgcaaattactgacccggcgattgtggcggctgcgaccttatcgcaccgttatattgccgaccgtcagttgccagataaagccatcgaccttatcgatgaggccggttctagcctgcgtatgcagatggactccaaaccggaatctctggatcgtctggaacgtcggattatccagttgaaactggaacagcaggcgctgaataaagagtctgacgacgccagtaagaaacgtttggaaatgctcaatgctgaattagagcaaaaagaacgcgaatattcagagttggaagaagagtggaaagccgaaaaagcctctttaaccggtactcagaatattaaaaccgaactggagcaggccaaaattagtctggagcaggctcgtcgcgttggcgatcttggtaagatgtccgaattgcaatacggtaaaattccagaactggagaaacagctggctgccgctactcaggccgaaggcaagaccatgaagttgctgcgtaaccgcgtaactgaaacggaaattgccgacgtgctggcgcgctggaccgggattccggtggcgcggatgctggaaagcgagcgcgacaagctgctgcgtatggaacaagacctgcatcagcgggttattggccagaacgaagcggttgaagccgtttctaacgcaattcgtcgtagccgtgccggtttgtcagatcctaaccgtccgatcggttcattcctattcctcggcccaaccggggtaggtaaaaccgaattgtgtaaagctctggcgactttcctgttcgacagcgacgacgctatggttcgtatcgatatgtccgagtttatggagaaacattccgtatctcgtttggttggtgcgcctccgggctacgtcggttatgaagagggggggtatctcaccgaagcggtacgtcgtcgtccttattcagtgattctgctggatgaagtcgagaaagcgcatccagatgtgttcaacatcctattgcaggtattggatgatggccgcctgaccgatggccaaggtagaacggtagacttccgtaataccgtcgtcatcatgacgtctaacctggggtctgatttaattcaggaacgcttcggtgaaagaagctatacggaaatgaaaaacatggttatggaagtggtcagccatcacttccgtcctgaattcattaaccgtatagatgaagtcgtcgtcttccatccgttggggcgggggcaattggcttcgattgccaagattcaattggagcgtttgtacaaacgtctggaagaacgtggctacgaagttactattaccgaacctgccttggagttcttgggtgaagctgggttcgatcctgtatacggggcgcggccgttgaaacgtgccatccagcaggaaattgaaaacccgctggcgcagcagatactttccggcaagttattaccgggtatccctgtgatattagatgttgaagacgggcatatcgtggccaaacagtcatagtgaaatggaaaggggcgatttatcgcccctttttgctttctttttacccagaaatgccatttttgatgtatttatagccggttggaaaattatttgaaattaggggttgcagcctgtcaggaactccctataatgcgcctccactgaccgggaacaacgaaacaaacttcgccgggtcaggaagtgttaagcaggcggaaacgccggttcttaaaacgaaagttgaaaagaaaagcttgacacttcagcgggaaagcgtattatctgcctcccgcgttaccgtaagattcgccgcaagcgaacgggtaacgaacgctctttaacaatttatcagacaatctgtgtgggcactcgcaagacgatatcaaagcctgtttcggcaggcagaagaaatatcaagtcttgaagagtgaccaaagcagtaaacatttgaacttcggttcgaatgcatatttgcagaaagtaatctttgagcatcgctacttcggtagcaaatcaaacaaatcttaaattgaagagtttgatcatggctcagattgaacgctggcggcaggcctaacacatgcaagtcgagcggcagcgggaagtagcttgctactttgccggcgagcggcggacgggtgagtaatgtctgggaaactgcctgatggagggggataactactggaaacggtagctaataccgcataacctcgcaagagcaaagtgggggaccttagggcctcacgccatcggatgtgcccagatgggattagctagtaggtggggtaatggctcacctaggcgacgatccctagctggtctgagaggatgaccagccacactggaactgagacacggtccagactcctacgggaggcagcagtggggaatattgcacaatgggcgcaagcctgatgcagccatgccgcgtgtgtgaagaaggccttcgggttgtaaagcactttcagcgaggaggaaggcatttcacctaatacgtgaagtgattgacgttactcgcagaagaagcaccggctaactccgtgccagcagccgcggtaatacggagggtgcaagcgttaatcggaattactgggcgtaaagcgcacgcaggcggtttgttaagtcagatgtgaaatccccgagcttaacttgggaactgcatttgaaactggcaagctagagtcttgtagaggggggtagaattccaggtgtagcggtgaaatgcgtagagatctggaggaataccggtggcgaaggcggccccctggacaaagacygacgctcaggtgcgaaagcgtggggagcaaacaggattagataccctggtagtccacgctgtaaacgatgtcgacttggaggttgtgcccttgaggcgtggcttccggagctaacgcgttaagtcgaccgcctggggagtacggccgcaaggttaaaactcaaatgaattgacgggggcccgcacaagcggtggagcatgtggtttaattcgatgcaacgcgaagaaccttacctactcttgacatccacagaacgtagcagagatgcttcggtgccttcgggaactgtgagacaggtgctgcatggctgtcgtcagctcgtgttgtgaaatgttgggttaagtcccgcaacgagcgcaacccttatcctttgttgccagcacgtcatggtgggaactcaagggagactgccggtgataaaccggaggaaggtggggatgacgtcaagtcatcatggcccttacgagtagggctacacacgtgctacaatggcagatacaaagtgaagcgaactcgcgagagcaagcggaccacataaagtctgtcgtagtccggattggagtctgcaactcgactccatgaagtcggaatcgctagtaatcgtagatcagaatgctacggtgaatacgttcccgggccttgtacacaccgcccgtcacaccatgggagtgggttgcaaaagaagtaggtagcttaaccttcgggagggcgcttaccactttgtgattcatgactggggtgaagtcgtaacaaggtaaccgtaggggaacctgcggttggatcacctccttacctaatgatacgcattgcgcagtgtccacacagattgtctgatagaaagtaacgagcaaataaggccgggctgagagattagtcgggctttagtaccttgttgggtckgtagctcaggtggttagagcgcacccctgataagggtgaggtcggtggttcaagtccactcagacccaccaactcatccctgtagtgcgttaccgtcacattcgtttataacaataaacgtgcgtgtctgcgccttgtctggacatgagttgcagcaataaggtatttgctttttatatggggctatagctcagctgggagagcgcctgccttgcacgcaggaggtcagcggttcgatcccgcttagctccaccatataaaactatttcaaaatatattgctgccgcaaggtggacagtatgttgtgaaatattgctctttaacaatctggaacaagctgaaaattgaaacactgcagctaaaacttgtctctccgtagatttaccgagacaaggagtcacctgcaggtagagtctctcaataatcgcagcacgatgatgtcgaaagacaccttcgggttgtgaggttaagcgactaagcgtacacggtggatgcctaggcagtcagaggcgatgaagggcgtgctaatctgcgaaaagcgtcggtaagctgatatgaagcgttacaaccgacgatacccgaatggggaaacccagtgcaattcgttgcactatcgttagatgaatacatagtctaacgaggcgaaccgggggaactgaaacatctaagtaccccgaggaaaagaaatcaaccgagattcccctagtagcggcgagcgaacggggaggagcccagagtctgaatcagtttgtgtgttagtggaagcgtctggaaagtcgcacggtacagggtgatagtcccgtacacaaaaatgcacatgctgtgaactcgatgagtagggcgggacacgtgacatcctgtctgaatatggggggaccatcctccaaggctaaatactcctgactgaccgatagtgaaccagtaccgtgagggaaaggcgaaaagaaccccggcgaggggagtgaaatagaacctgaaaccgtgtacgtacaagcagtgggagcaccttcgtggtgtgactgcgtaccttttgtataatgggtcagcgacttatattttgtagcaaggttaaccgtataggggagccgtagggaaaccgagtcttaactgggcgtctagttgcaaggtatagacccgaaacccggtgatctagccatgggcaggttgaaggttgggtaacactaactggaggaccgaaccgactaatgttgaaaaattagcggatgacttgtggctgggggtgaaaggccaatcaaaccgggagatagctggttctccccgaaagctatttaggtagcgcctcgtgaactcatcttcgggggtagagcactgtttcggctaggggtccatcccggattaccaaaccgatgcaaactccgaataccgaagaatgttatcacgggagacacacggcgggtgctaacgtccgtcgtgaagagggaaacaacccagaccgccagctaaggtcccaaagtcatggttaagtgggaaacgatgtgggaaggcatagacagccaggatgttggcttagaagcagccatcatttaaagaaagcgtaatagctcactggtcgagtcggcctgcgcggaagatgtaacggggctaaaccatgcaccgaagctgcggcagcgacacttaggtgttgttgggtaggggagcgttctgtaagccgttgaaggtagtctgtgaggactgctggaggtatcagaagtgcgaatgctgacataagtaacgataatgcgggtgaaaaacccgcacgccggaagaccaagggttcctgtccaacgttaatcggggcagggtgagtcgacccctaaggcgaggctgaaaagcgtagtcgatgggaaacaggttaatattcctgtacttggtgttactgcgaaggggggacggagaaggctaggctagccgggcgacggttgtcccggtttaagcgtgtaggggggtattcctggtaaatccggaaaaccatcaaccctgaggcgtgatgacgatgcacyacggtgcagaagtagttgatgccaagcttccaggaaaagcctctaagcatcaggtaacattaaatcgtaccccaaaccgacacaggtggtcaggtagagaatactcaggcgcttgagagaactcgggtgaaggaactaggcaaaatggtgccgtaacttcgggagaaggcacgctggcgctaggtgaagagacttgctctcggagctgaagccagtcgcagataccagctggctgcaactgtttaataaaaacacagcactgtgcaaacacgaaagtggacgtatacggtgtgacgcctgcccggtgctggaaggttaattgatggggtcagccgcaaggcgaagctcttgatcgaagccccagtaaacggcggccgtaactataacggtcctaaggtagcgaaattccttgtcgggtaagttccgacctgcacgaatggcgtaatgatggccaggctgtctccacccgagactcagtgaaattgaactcgctgtgaagatgcagtgtacccgcggcaagacggaaagaccccgtgaacctttactatagcttgacactgaacattgagccttgatgtgtaggataggtgggaggcatcgaagcgtggacgccagtctgcgtggagccaaccttgaaataccaccctttaatgtttgatgttctaactcggccccataatctggggtgaggacagtgtctggtgggtagtttgactggggcggtctcctcccaaagagtaacggaggagcacgaaggttagctaatcacggtcggacatcgtgaggttagtgcaaaggcataagctagcttgactgcgagagtgacggctcgagcaggtacgaaagtaggtcttagtgatccggtggttctgaatggaagggccatcgctcaacggataaaaggtactccggggataacaggctgataccgcccaagagttcatatcgacggcggtgtttggcacctcgatgtcggctcatcacatcctggggctgaagtaggtcccaagggtatggctgttcgccatttaaagtggtacgcgagctgggtttagaacgtcgtgagacagttcggtccctatctgccgtgggcgttggaagattgagaggggctgctcctagtacgagaggaccggagtggacgcatcactggtgttcgggttgtcatgccaatggcattgcccggtagctaaatgcggaaaagataagcgctgaaagcatctaagcgcgaaacttgcctcaagatgagtcttccctggggcttcaagccccctgaaggaacgttaaagactatgacgttgataggctgggtgtgtaagtgcagcgatgcattgagctaaccagtactaatgatccgtgaggcttaaccttacaacaccgaaggtgttttagagagcgttttgattttcagcattgttaacagattggattgactggctgtgtggtgtaaatcacgtggcgggttgattgaaacagaatttgcctggcggcaatagcgcggtggtcccacctgatcccatgccgaactcagaagtgaaacgccgtagcgccgatggtagtgtggggtctccccatgcgagagtaggacactgccaggcatcaaataaacaaaagaggctaccctaacgggtggccttttttgtttgtctcgtttgggtggtgtgcgactcgagcatgcatgcgacaaactgcgcctgcgctggccccagcggggtgagtctcatccagaagatgagacgaatacagtggacactgccaggcatcaaatcaagcccagaccccatgccaaaagcgtggggtttttgctatggaaaaaagacagacgcgaggcggataaaagtcattgccgccctcgaaccgagcctcctgcgattgcggggggctttttgcgtttaagggcatgggaacccccgggaatgccgggcgttgaaggcgtatatggcgattttcattccataaggggcggcttatccggtaaattgcgccgccgttgacgttttcaggcagtaaattcgcagcattttcaggcagatacagtcactcaccgggcttatattaggtggggaatcaactaccgtcccagtaacattgatttttccatcaacgctggcaccgaaggatattatttagagagatagcactgaccagtaacgttttattgaatatagaaatatcctttaatagtttaaggatgagcattccgtaacgttgagtttaattcgctgcctgataaacaccgtatccggccatggcaccagctacatcccagacgaagtctttccagctccaccctgtaccgccctgacggctatcgtagaactctttccccgcacctatacctatagagaacaataaaccaaagctgcgactgcgggcgtctgaccaattctggtgctcgccatatgccgtgcctgccgcggcaaaagcagcggaggcgaagaagtgctgagctttgtctttccccgtccagctatcgttggccatgtgggtgcaggcagtgctcagaaagaataggggggcgatgacggccgaacggagatatgaacatcgctccatggagtattccttttgtagatgaaataaaaacctgtctttagataaagtagcatgtcaattccattaccgaaaccgatcagaaactgaatgaagggcaataagttagctactttagccgccagatataatcagccgccttttggagaccatatttacgggtaaactccgagccttaaaaatcagcgtctctttagtatgtaagatttaaatccgatgaagccaaaatatgttgatggcaaagtcgttagccataactttaatttggccaataaaaaacccggctattaaccgggttgcgatctgaccatcgaaatctacaggatgcggctgattagacggtcgatacgaattcgccgtaagcgacgaatcagtttcctgaccttcaccggatattgctgaatattttccagctcaaggtagtgggaaacaactttggtatgcgtacggatgcattctagctctttcgcccgctgttcgtgcatttcatgcttgggatcgtggatcaaaatggcgttttccagatccaggcgccaggcgcgcgggtttaggttattacccgtaatcagctgccaggtatcgtctacccacatgcctttcagatgataagtgttatcgccgtctttccatagtcgaaccacaagctggccgttatccacaaagcgctgtaagcgactgaggaagcggcgcagatttatttcatacagataaggtaaagctccgatgatcttgaaaggctgatcttccggaatatagaaatcgtttgccgttttgtccccgacaataatctcaacctgttttccttcgcgcagcaaataaatgatattgcgtaccagcagtgcaggcaggttgaaataaggagtgcagatagtgagcttttcgtcggcagaacacatcagatgatgtattgctttatttaaaggacttttctttcccaggccaaccaacggggtcacggctagttcatcattactgcttcgatccgtaaattcataaccgacatcacgcagggataagcggaattggcgggtctcgttttttatttcagggttttttggacgatcgctacgatctaagcgctgaaccgcaccggctcccaggatctgttgcttgatgtattccgccattgcattcgccatagccggatttttaattaactggtagcgatcgtaacggtatttatcgtgctgatgcagataaacatcattaatactggcaccgctgtaaatgactctgtcatcaataataaaacctttcagatgcagaacacccaaggcttcgcgagtatttaccggtacgccatacactggaacggcaacgcccggatgctttgccgccatatcacaataccaatcggcgttggtattaactgcagcagcaccaatacgcccgcgttgggcacgatgccagtcaactaatacgcaaatttccagctcaggccgctgttgtttcgcctgataaagtgcctgcatgacgtcccgaccagcatcatcttgttccagatacagtgcgaccaaataaatacgttgggttgcctgagcaattaattccagcagagttgcgcggaaaaccttcgggcagtaaagcgtttggacatcatcaactgactgggggagtttgggcagttgtgcaaggtgttgttgatgtttgctacgtttgaattttgacaacatcacagtgcgcttcttctctcgttatttgatggcaaaaccgccatagcttaagaatactaatccatagaatctggcgataataccactagttacccgtgttgtgcgtaagttttgcctgcgggttagctaatcgaccagctctgtggcctcggtcacccttatgttcgtcatctttcacgctggctgcttgcttccaatccaatgacttcgcgggttaagcttcggcaaatttgtgccgttgccgtttggccacggcgtgaaatttatcgggcataaatgagtcaataaatcacagtgttaattcgagattaacgattccgtcttccaactgtacgtcaacgttgaaccccaacttttgtgccagtccgatcatcccgcgattgtgcggcatggtaatggcggttaaacgggttaaaccgtggcctcgggtatagtgaatcattttctccaatagccgactgcctagccccaaacctttcaggtcggatcgaaccagtactgcgaactcggcgtcaatattgtctggatcgcttaaggcgcgagtgacaccaatgatttcgctgtttccatgttgctgacgcacagcgacaaaagccatttctcgatcgtagtcgatttgcgtcatattcgccaaatcatcgtgattgaactcgtttatctcactaaaatagcggtaataaagatcttcttttgtcaccttatcaatgaagtctttcagcaaaggctcgtcttctggcaggattgggcggaacaggcaggaggaaccgtcttttaggtgcaccagttcttccagttcttgcggatagggacgaatggccaggcgagtttgcggatcgccgctaattggcgccaactgcatagaaacatccaatagcgtgaattcactgccggaggccagcaccgggtgaatatccagacgggttatctctgggcaatcgagtatcagattggaaacctgcaccagcaggtggctaaggccaggaatatccaaaggttgtagcgcgccccgccggcgaatttttccaccttttaccgcctgtaaaatcagatagcgggccagcgccatattcagcggcggcagagcaaccgccgcctgtgtttcctgatgccactccacgccaccttctcccagcataatcagcgggccgaaaatggcatcttgctccaccacaatccgcagttcctgtgcaccagcgcggtgagccatgctttgtaccagcaggccatgaatacgtgcctggggataagtgcgcttaacccgatcgagaatatcatcagcggcgcgctgcacttctagcgcggtgcgcagatagagcattaccccctgaacctccgatttgtggggaatatccggtgagcgcagtttgattgctaccggatagccaatttgttcagcgatatgtaccgcttccacgctgtcactggcaatccaggttggcaggatgctaagaccgtaggcttgcagaattggctgcacttcatgggtatccaattgcgtagtgccttccgccagcgcctgacgaattaactgatgcacgtgagtggtattggctgttagtcctaccggtagagcgggtgtttcctttaattgtttctggttacggcggtattccaccatatgcataaaagcggtaatagcgccctctggagtgcgataagtcggtattcccgcttcggtaaacattcggcgggcgtcctgagatgaatattcgccacaccaattagttagtaaggtaattcgttttccgcgcgggtgttgctggatggccgaaatcagcagttcggccgttttattaccgggagccgccgcgctaggggagtgaattaatagcagcgcatcataatctgtactgtctaataacggcctgaccgccgccaggtagcgttcagcgctggcatcgtcccgtaggtctattgggttgcggatggtgacaaaaggcggtagtgcctcgcttagcgcgcgatgagtttgttccgataaggtcgccagcttgccgttacggctaatcaattcgtccagtgccatcgccgctggcgcagagccgttgctgacaatcagtagcttttcaccgcgtagcgggcgcatatgactgagcgtttcgaccgcagagaataattcgtgcgtgtcttgcactcgcaataaacccgctcgttggattgctgcgtcgtaggcggcgtccagcccttgctggccatcgagtaactgctgagcgcgctgagttcgaccactttttactactaaaatgggtttattacgcgaggcgctgcgagaggcggataaaaagcggcgggcgtcgctgatatgctcgatatacagcatgatggcgctggttttggcatcgcgagacaggaaatcgagcagatcatccaaatcgatatccaaactgtcgcccagcgcaataaagtaggaaaaaccgacttctcgctgctgcgcccagtccagcaccgtgttggccaccgccgccgactgggagatgaatgccagcttgcctttttgaatcggaactggagaaaaactggcgttcagtccttgccacggagccagtagcccaaggctatttggcccaagtaatcgcatgttatagcgatgggcacaggcttttaactcggcgaattgatctggcggcgcggacagaataataacggttttacagccgcgggtgcctaaggcatccaaaagtgacagattacggctggcattggtgcagagaatggctaaatccggcgttagcggcagggacgcgatatccggataggccaatacgccgctgaccgctttatagcttggcgtgaccggtaaaattggcccattaaacccgccgtccagcagattacgcatcatcaggaagcccgcccgctccggtttttcagaggcaccgataaccgcaatcgacttggggcgtaacagtgcttctaatcctcgttggctcatggcgtctcctgttagttaacctgctaaaggttgccagagagactttagtcgttttttggcagaattgctgtgacccgtggcactggatggtgaggtttgcctgctaagtattgctgcctgaaatagttaaagtgtgcgctcagtccttccgccgcttgcaaatcgccagcctgctccagcaaagcggcagcaacttcaacggtgcaatgctgttccggtcgctgggcttcgcgtagctgatagtttgaagtcatgttgacgttaagagaaagcatcggtaatcccgcaagatatgggcttttgcgaaacattttctttgcttctgtccaagtgccgtcgagcagaataaacagcggtggcttgccgcctgcagggatcttattaagaacctgtcgatccggttcggcgtaggcttcgggaaacacgacataaggctggcgggaaggatcggcaatggctgctagtagcgccgggtctacttcagttctggcccacaggaaggcctgtgtgttcggcagaatatcggcgattaaacggccggtattgctgggtttaagcggctcggtgtcgaacatcaccaaacaaaaacggctggtggcctgtaatggtctaatggtgtcgcacagacacagacgctcggccagcaggcaattttgacagcgaatggcgcgacaaccgcgggcgcggtaagggcgagtcgaagcgtcgaggcgttgtttacgcaggcgcagaacggcattttcagtcataacggcggcggcagatggtgtatcagtcacgactgactcctgagaaaaagcgctattctaatcaacccttggggacagggatagaacaaacgctccggcggagaaattctcggccggagcgggggagttaaccgcgatgattcactcgaaatgggttaaactaacgctagggtaaactgattactgcgccaattgctcatccagccagccttcaaaaggggctttaggcagcgcgccgctgagcatatcgaccattttgccgtttttatacagcataatggtgggaatgctgcgaatgcgaaaacgcgtactgagagcaggttccgcttcggtattgactttgacgaagcgaatcttgcctgcgcgctcattcgccacatcttcaaagattggcgcaaagctgcgacacggcccacaccaaggcgcccagaagtcgataacaaccggcaggtcgtcctgtagcagtttatccagcgtttctgcggtggcgttgctcacttcgccgtcaaacagcgaatgaccacagcggccgcatttagcgccatcatcaatacgttcttccggcaggcggttggtcgccatacatgctgtgcataccgtattcataaattagccttaattcttgggtaaagagagctggaaacaacagtattaagtggttttagcgtgggagagcgcgactctgaccacggtgttgtttcgtttatgttatctattatgatgacaaatgctgtcatcgccaaaaaggtttattcgatgaatacgatagttgccggcttttagcgctcgcttatggcttaccgggcggacatcaggtaatcttcgcgccctgcgcgttggtggagaagacaatgaacgattcatttagtggcaaaaacggcaaagttaaagtgatgtacgtccgtagtgacgagagcagcagcgacgaccgtaacaaaaacaagcgtccggcaggcaaaggccgtccggataacgcacgtcagggcggttcgcatcagggcaatccacgtcaggatggctcacgtcaggacaattcacgtcgtggtgactctcgtcgtagtgattcaggccgtaatgaaagcgatcgtcctcgccgtccggcccgttccgaagatcgcggcccgtacgactcaccgtggaagaccgtttcccgtgcgccgtccgaagagccagagtttgaccacggcggcatcggcggtaagagccatatcgatccggcacagctgcgtcgtcagcgtgcggaagaaacccgtgtgtatggcgaaaatgcctgtcaggcgctgtttaacagccgtcctgatgccattgttcgcgcctggtttgtgcagtccgtcacgccgcgattccgcgaagcgttgaaatggatggcggcaaaccgtaaggcttatcacgtggttgatgaagaagaactggcgaaggcctccggcaccgagcatcacggtggcgtatgcttcctgattaagaaacgtcagggtctggacgcggaaacttatctgcaacaggctccgcaacaagattgcgtattggcgctggaagaagtgggtaacccgcacaatctgggcgcaattatgcgtacttgtgcgcatttcggtattaacggcgtattgctgcaagatccggcaatgttggaatccggtgcggcagtacgtaccgcagaaggcggcgcggaacacatcaaagcgattaacgccgatgatttcctctccgtattggataccttccgtaacgcgggctacaccattgtgaccacttccagccataaagggacgactctggcgaaagccgagctgcctgccaaaatggtattggtgttaggtcaggaaagtgatggtctgacggacagcgcgtggcagcagggcgatctcagcgtttctatcggcgggactggccgggtagaaagcctgaatgtttccgttgcgaccggtattttactggcggaatggtggcgtcagaacagcggcgaataagccattgagctttgcgtagcacgcacagccagtgattttgtcgcgttgattcagcgggtttaacccggtaatccagtcaggctcaaactatgtttgggcctgatttgtttgtaacgtaatatgttaaatatttgattttttcagtatcagtatcatcctgttttcatttatttccccgtaaaatccaacggactctgtttttattcacatgactattaattgataaataagcgagatggttaatttgttttgttgttaatcctattacctatattaaaagcacgataaatattttgtgtgataatttaatgattaatttgctaataattaattaatccgcatttaattaaaatcaataaaataaattaattcgataaaaacagctaaattagaaataatagctataattattttttatgatataaatcgctgcttatgtaattagattgattaatatatgtaatttcatgcgagaatttaaattaaatacttttaaaaacaaggcgctattgtttctatagtgttggcgcaatgatgtcgaaactcgctatcagcgcactctatatcaccaaaataatgtatttcccgatttgaatcatcccaatttaatttatttgaatgtgaggaagagcttcatggaaaggcgtgcatttctgaaaggagcggcagctctgggtttaacggccggagctgcgtcggtcaatgcggtagaaaatgcgtcattaccgctgacggatgatgttgaaggggcattagcccgtttccgtaaaacggttccagccaattttaattccgattatgttgagaatgcggttatacctttctttctgagtcgtttctatgacggtgaaaaaccgatgttgccgatgattggcctgagtctcagcaagaaaaatgcgctgccctatgatctgtggggattgctgtataaggattggaaaccgacgccatccgaaggagaaaccgtatttttgcaagggctggatgagcgcggagaacataatatgcgtaagcgcatatattattccgcggtgacgcccgatttatatcagccaatgtatcaggaaaaaatcgcggcatttttcgatctgttaatggaaccgcaatttgcggataaaccttttatgcgtcactacgcggatcattatgtcgacgtatattgggatctgcatttaggcgttaaagggcaggcggtaccgcaaaaggttcgtgaagtcggtgagtcttttaatgctgtgctggcctatcgcgatcctcttcaacccattgtctacgaacattatatgagggttcgcagcaatattgattatcttaaacaatggattgatgagcgcgtggatgatattcgaaccggacgcgttgccgaaccgcaaaaaacgctggcctggtattggctaaaaaactccgaaaataacgataatttcagcaagaaagatatcgtttttgagtgtttccataactttgttgctttcaatcaatggggcaaaacgctgtatggcatcatgatgaatctcagcgaaaataatggcgatccggcggtaaaagccgccttcaagaaaaccatgagcggagattatcagaatgccaaagacgcggcctacacgccgttggatctattggttatggagttattccgcactatttcgccaaacgcccgcagtgtttccgttgcagaggatgtgcagcataaagtgtatggcgagcgttttggcctgccgttgaagcgccatagctatatcaacacgcctcataccagcagtaacttcaatccggttcactgggcgcagccggagaaatttgatcctgaacgttatctcaaggtgccgaccagcgcggaaatcaccgaagaagaatgcaagcgtatcggtttggctcgctgcccgttcgatattacctcaatgccggtaaacgatggccgcaatatggcagtgaccaacagcggatttgggacggtatttagcgtcattgatgataaaaaacaaccggtatgtgattacgccggttttgctccctttggtttcagctatcgccgttgtccgggagagcagtttactattcaggttatgggcgaatttttgaccaaagtctggcgggataaaattaccttccataaactggcgttggttaagcccgagagagtgccgatcagtccgcgaacggtgatcgatgacaatatcagtttcagaagatagctatagatactcgtgatgttactggcaaaaaaatgccgctcgttgataagcgagcggcatgagaatcctgaatcagcctgatttagtgggcaccaccgccaccgccaccggaggtaaacggaggacgggcaaaccacactaacaccagtaatagcaggaacaccccagccgacagccagaaaatctcattagccgaaattatcagcccctgattggtaatttcccgtgccagataggccgaggcctgctggtggttcatgcctaacttctccaattcctgataggtctgcaccgaattcgggttatacggattcacaaactccgttaactgggaatggtgcagagactcgcgctgactccagagcgtggtggtgattgaggtaccaatcgatcccgccagcgttcgtaaaaagttagacaaactggacgcggccgccattctttccggcgctaaaccggacagggtaatcgtggtcagtggcataaagaagcaggcaatagcgaaaccttgcacaaactgcggccacgctgacgcgccaaaatccattcccggctcgaatgtatatgcccgccagtagaaacaaactgcatacataatgaagctgaatgtcactagctggcgcatatcgatacgatgagaaaaacgcccgataatcggcgacagtatcactggcaaaatcccgaccggagccgatgctaatccagcccaggtagcggtatagccatagacttcttgcagtaactgtggcagcagtacaatagcgccgaagtacaacatataggccaggctgatacacagacagccaatagtaaagttacgcgatttaaacagcgagaggtcgataaccggatgatcgtcggtcaactcccagacaattaagaaggaaatcgccaccaccgcgacggctgccaagacaataatttcggtggagttaaaccaatccagctctttgccctgatccagcatgatctgcaaggctccgatcccgaccaccaatagcaccaatccgatagtatcgatcggtttgatttcggttttggtttcccgccctttcagggtttgcatcgcgaccagaatcaccacgatcccaattgggatgttgatgaagaagatccagccccagtgatagttatcgctgatataaccgcccagaatcgggccaaatatcggggcgaccacgatggtcatcgaccatagtgccagagccattcctcgcttggcggggggatagttattcagtagcaaactctgcgacagcgggatcaacgggccggcaaccagcccctgaatcacgcggaagaagatcagcatacctaaactattggaaacgccgcatagccaggaggctagcgcgaatagcgcggttgaccacagaaataagcgaacctcaccaattcgtttcgccagccagccggtgatggggatcgagatcgcgttcgccacaccaaacgaggtgataacccaggtgccctgtgagttcgaggatcccagatcgcctgctatggtcggtattgccacgttagcaatggtggaatccagcacctgcatgaaggtcgccagcgagagcgcgaccgtcatccaggcgagtctggagccctctaggggtttttgagccacattagcctccggcgggcttaactggcattcgcctggatcacatcggcaatcatttgattaaccggtgccagatccagagaaagcgcattactttcgaaggcgggttttttacgtacgctttcggccagaaccaatccatcctgattcgccgtatcgacccgaacgacggaagacaaaccgatacgcaacgggtgctctgctagctgtttggcatccagctcgatacgcaccggcaggcgctgtaccactttgatccagttaccggtggcgttttgcgctggcagtaaagagaaggcgctgcctgtccccatatccagaccgaccactttgccctgataaaccacatcgtcgccgtagaaatcagtgactacggtagccggttggccgatacgcatattagccaattgggtttctttgaagttggcgtcgatccacagctcattggcgggaaccacggccatcagcggcgtaccgctggcgatctcagcgccaacttgcacgctgcgacgggaaacgtaaccggtgatcgggctgacaattttggtgcgctgcaacgctaaccaagcgtcacgcatttgcgcggcggcctgctcgatagccggttgtttctccagcggcgtatttaaaaccatggcctgattggcgttaaattgctgtaccgctacgtcgagcgtcgctttggccgcttctaccgcatcgcgggcgtgttgcaattcttctcgaccaatcgcatctgccgcgcccagcacttcacgacgtttaagatcgctttgagcttttttcagttcggtttttcttaactcgatattggcctgatactgcttgccgttaatcacgagctggtgggtttgacgcacgctgttcgccagcgcggtttgtgctctggcaaaagcctgctcagcatcggtggtatcaagagtgaccagtacatcgccgctttttaccaaatcggtattttcgaagttaacgctaacaacgctgccgggcacctgggacataatctgtacctgattaccggaaatataggcattatccgtttcctgatggtgacgcagcaccaggaaccagtaaaccagataagctaccccaataatgataaaaataaccgtcaagagaatcagtatattcttgcgctgcttctttttattttgcggttgtggcggggtttgaatttcctcgcttgcgctcatggtgttctccacgctttatattattttgttgtatgagccatcgctgtcggagcttgatagccgccgcccagtgaacggatcagtccgatcttcgcctgcaataagttattgctggcgctaagttctgcctgttgttgttgcaagaattgtgactggctggtcaatagttcgccgcgtccgataatcccggcttgatagcgagcattggcaacgcgatacacctgttccatcgcggcggaggctgaagcggcttgttgtaactgctgctggctgctctgctggatggtaatggcgtccgccgtttcctgtaccgcatttaaaatagtttggttataggcttcgacagcttcgtcgtataaagccgattcttcaccgagtttgctgcgtagcgcgcctgcgtggaatatcggtagggaaattgccggagcaaagttccatgcctgactggcggcttcgagcagattcgggttagtcccctggaaattggtggtggagaaaccggcaaagccggtgattgataagcttggataaaactcttttttcgccgcctgtactcgctgatcgtaagattcgaccaacaaacgttgagcggtgatatccggccgttgacccagtaaatcggtagtcagctctgcgggaggagataagcgattaatatccggaaggttcacctgacgtaggttttgcgttgcgctcggtccttgcccggtcagggcggccaattgatgttttaattgctcgctctgcgcggttagctggattatttgctgttttacgccgtcagactgcgcctgagtctgctgcggaacttcaacgccgtagatacccgcctgatattgtttctgatgtaacgccacccgacgctgattgttttccacttcctgctgcaatagcttttgcagcgccagatggctttggagctggtaataaaccgaagctactgagctggttagcgttagcgtggcctgttgctgctctgcccgggcagcatcgacctgtgctttagccgcgttgacccgattgcggaatttcccccaccagtcaaactcgtagctcatgtttagccccagcgtattcgctgtttcatacagaggcttgtttggataagcctgcaaaaatggctgaagcgtattttgcgatattttttgtcggttgctgctgccgtacaggtccagatttggcccgttggcagcatctgcctgccccatcacgctttgtgcctcacgtacccgcgccgccgcctgtttcagcgacggtgaggtttgcaggctttgtgtcattaatgcatcaagctggggatcgtccagaacccgccaccactgagagcttatcgccagcgaactggttttcggttgcgccaattgcagttgctggttatccatcatacgagactgaggcgcaatattatcgcttgaggcacagcccgccagtagtaaaacggcgaacaaaggcgtgaccctccagctatgtggggatggcatagttatgttacctggacagagatgtaaggattacaattctggcacttccatttgatccagacgggttaatagcttacgagtcagcttttcaagctgttgctgctcgtcagcatccagtgttgaccagaggaaatgcagacatttatgttgcggcggcaggagttggtttagaaactcttcaccggccttggttaaatgcagatgaaggcaacggcgatcgttatggctttcgcgccgttcgatccaaccttttttctccagctcatcagcaatgcgggtcgcgttggtacgagacgatcctaatgctgcgctcagttctgaaggctgaatgctgtggctttcctgagcatccaaagtaattaatgccatgaacagggtttcgttaatcccttgagctttcaacatcttattgcgattttcgagcaacttgctatgcatatgcatgcacaggcgggtcagcagaatttcctggtaagggaagtccttctgacgtttagcacgaaaattaagcatttgttcaatgggagtaaacgagctttccatgataaagagcctcattaatttcagatgatacagtaacgatagttactaataatgtaaacgctataatacggtaaaactttagcaattagtgttatttcaccgaggtatagcgttgattaatgccaaggatagtagggatatcgcggaattgcccacgttttgaatgcgttatcccatcattagcaatttgaaggttattccgtagctcagagcgccaaataaagtagcgaaaatgatgctcttggttttatagaaataggcgcagatcacgataaatccgaccaaagtagggatgagtttgtgcgcgtcacgcacaatttccggcacgctggaaaccaccagtagggcgcaaatcgaagcaattccgatactatccagcaggagcgaaattttcccgcgttgcagaccggcctgcttgcgcgctgggcccagccgtagcgggagataacggaataaatagttcaccagcccgaccaccacgccgattacgatgacatccgtattcatagctgttgctccttagcctgtttttctgccgcatttgaatctgttaaagacgcagcgggaggctgaattaacgccgccaggcagccaccgcagataccagccagaatcgccaccggaatagagaatacgagtgctcccagcaatgcgccacctagcgaagccaccaccgtcaggctgtattggcgtttaaaggaggcgagcagaaaactcaaaaatagcgctggcagcataaaggacagtgaggcttcaactgccggatagttatctaacggtccgttgccaaatacggcacctaccgctgtgcccaccacccaggacagccaggaggtgaatgagatgcccagcatccagttttcactccagcggcgctgatctttcatcagtttagcggtagcggcagcgaagacttcatcggttaatccgaaggcccacagggcggttttcttaccggatagacgcgccacaatgcggtgttttaacgcggggccatacagaatatggcggacatccattgccattaccgttagggcggaaacccatagggacattcccgcgctcaataatgcggtaatcacgaattggctggcaccggcataaataatgcaggaaaagaaaatgctttccagaggagtaaaccccagcttaactgcgcttaatccaaaggcaaaagctacggggagataaccgatcacgataggaaggctatcggtcacaccttcacgaaaacgggcgatgggttgatcgggggaaagggagtgagttattggctttggcatgatggtagctacgggtcggctcggttaaagggtagaaagcaaatttaaacatttggtaacattaccagagtgttaatactctttgtaccccatatccaaaatttatatctcaatttactatttgcaagctaatcatttaatttttttaaattagctcactggatgatcggccgcagggtcaaatttcttacccattaaccacaccacaatattgagcagacacaatccgcagccggcaatggcaacgccgtaccagcccgcatgttgataggcagcggcagaaaccagcgagcccaatgcgccgccgataaagtaaatggtcatataacctgcggttaagcggttccgcgcttcaggcatcatacggtaaatcacgctttggttagtgacatgcaccgcctgcaccgccagatccaaaatgacgacgccaatgattagcgcgattaacgaatattgccccaaagcgatggggatccatgacagcagcagcaggcccagaccggcgctggtggttagtcgcgctttacctttatccgccaaacgacccgctttgtttgccatcagagcgccagcggcgcccaccagaccgaatagaccgatggtaccttcggaataaccgaaaggaggtgaggccaacaaaaaggccattgaagtccataacacgctgaaattagcgaaagacaaggctcccagcatagcgcgagtgcgtaataccggcgtaccgaaatacagcgcaaaaatagaacttagcaattgcccgtagttcagaccggccttttgtttataacgcggtaggtagcgccacagcaccagcgccatcaccgccattagcacgctggcaacccagaaaatagttcgccagccaccgagggaagccagtgcgccagccacggttcgcgccagtagaatacccagcaataggccactcatgatggtgccgacgacctgaccgcgcttctccggtttggccagggttgcagccaggggaaccagtaactgcgcgaccaccgagaacaaaccggtcagcgcggtgcccacgatcatcatggtcaggttttgcgacatcgccgtaatcagcatgccgccagcggctaacagcgtcatgccgacgatcagaccgcggcgctcaaacatatctcccaacggcactaaaaacatcagcccaacggcatagcccaattgagctgcggtaacgataaatccagcctgattgaccgaaagattaaatgcctgagcaatggtttccagcaacggttgagcgtaatagttactggcgaccgccagaccggtagcgatagacatcagtacgatcaacgcagggcttagcccggcatgttcagttgtttggttcatgaataattctgcttaagatgatgagggcgacagtattggataaatttaaacgataaaccaatgtataattttcatctgattaatctcatttcgagatagataaatgaacctgaagcagattcgttatgcactggcggtggcagaaacccaaagttttactcaggcggcgcaacgttgtcatacggtgcaatcggcgctgagccaccagattgctcgtctggagcaagagttgggttgccagctgtttgaacgtacttcgcggcgggtcagcttaaccgacgccggacaggcttttattctgcccgctcaacgcttgttggcggagcagcaaagcctgatcaatgaagttaatgccgccagcggtaacgtgaccggtactttgactctcggcactatttcaacgctaaatgcctttgatctgacggaaaagattggagaatttaatcgctgttatccggcggtgaatattcggctgtatgttggaatgagtgaaactttgcttgaagacacccgacagcagaaaaccgatgtgtcttttgtcggcatctggccgggggataaaaatacgttgccgctttctcattgtaagctaacggatgagcctctggtggcgctggtggcaccggatcatgttttagccggtaaggccagcgtagacctgcaaacattggctgctgtcccgctggtggatttctacagcggtacgggggcgagacgtcaaaccgatcgcgcttttcagaccgcgggtatcaagcgccacgtcaatttcgagattgatcatattgaatggctggaaaatctggtgcgacgtgggctggcggcggggatcgttcctgtctcgaccgctcagcggctaatttctctggtgtctatcccgatcgacgatgggccgcggcgtcaggtttattgcatctggcatacgccgcttagcgctgccgccgaacgtttcctgcattttagcgggtttaccggacagggtatcgccagcgctgagtaaatctggaaagtccgtaagatgagcggttagattgccagataaaaaaacaggcaccgaaaggcgcctgtctggtttacgtcagcggaggaggtttattgcgcggttttgttattggcagcttcagcggcggtttttacccagccgtcaaaggttgcctgatgcgcggctatccagccattcacatggcgctcaatattcgcatccgatgattcaccggcgtgcattctcatattctgcgcattcacgtcactaatcggtagtttcatgatagagaacagtttggcggcagccggattcgcttccgcccatttcttattggcgacgatgtgcatcacgcttggcggaaaaccgtagttggcaccgttagccagttgggtatcgatgcttttatccggcagggaggagaacggtacttgcagccagattacgtcacgacccggaaccagcacatcgctaacccagtaaggcgtccaggtgtaatacaaaattggcttgccttctttgtaacgggtaatggtatcggcaatcattgccgcatagttgccctgattatgggtgacggtattactcaacccataagcatcaatctgatgattaattggtgcttcacaaccccaacccggattacagccagtcagatcggctttgccatcgttgttggcgtcaaacagcttggcaatcttcggatctttaagctgttcaatattggtaatgtggtatttatccgcagttttcttatcgatcaaatagccctgcgccaagccttcaatataattgccctgacgatagaatttggcatcgccacccgccgctttatattggtcgtcatgcagcggctcccagtttaccgccagaaaagtcgcatcaccggcagcgatagtggcataagccacgttgtaatcaacttccttggtcggttgaacgtcgtagccgagtttttccagcgctttattcaccagcgcggtctggaaggtttcttcggaaatggtgctttgaatgggtaaaacggtcacgcctttgcccggtaattcagcggcggataattgagagctaaccagcgtagtgagagccagtgcccagatgcctgtggtgcgcatgagttgttccttcttagtcttgcccttcatctttcacgccgcagcggtactggctgcaacctgaaatctatcgggcatgagtaaaattgatgacttattaagcccattttagggagagcgcagcgatgggatcgaattggcgtcagccacctgaacgcctttggcgtggtagaaccaagaatctcgcttgaatcccgttccctgtactgcgccgcgattttggctatccatagggtatttatatgatttgtttttaacgctgccgctgggacgattgccattgcggcagcgttaagaacgcaggctatcagcccttgtaacaagctgttatcacgcttttttgataaaaggtttggcgatcagacccagcgggccagtggtgtaccagcggccaacgcctttgctacggcgatctcggcccagagattgagttaggcggtcgaggataatcgccagaataacaatccccacgccaccgacggcagctaatcccatatccagacggccaataccacgcagtaccatttgacctaaaccaccgaccgcaatcatcgaggcaatcaccaccatagacagcgccagcatcagagtctggttaacgccggccataatggtcggcatcgccagcggcaattgcaccttaaacagcaactggcgtggattggcaccaaaggattctgcggcctcgattagatcttccggcacctgtttgatacctaaaatagtcaatcgcactatgggtggcagagcaaagataatggtgacgaccacgcccggcacgttaccgataccgaacagcatcacgattggaaccagatagacaaacgctggtgtagtctgcatcgcatccaataatggcctgataattctggcggcgttattactgcgtgccagccagatcccgaggggcagcccgatcaaaatacagaagaacagcgaagtcagaaccagcgccaacgtaaccatcgcctgtgaccatgcgccgatggcaccgatagcaatcagagacaccagcgttgcgacgcccatccccaaggtagaaaactgccatgcaatcagagcgaaaaccagaatcgcaaccggcgctggcattcccagcaacatgtgctgaaaaccgctcaggataaaatcaaccggaacccgaatgccctgaaataccgggcggaagtgagtcacaacccagtcaataccctgtgtaacccacgagtccagcggcacccacgtgttgtggaatgggtccatcaggctaaaatgctcgggagcgacagcaggcgcgctgtttaaccagtctgcgcctgtttgtgcggtttggttggttgcttcctgagccgccgcgctgccctgagccatgctggcgccccaaggatctgccgcagcagaaagtacctgcggcgcagcatcggtagcggtggtcgacgcctgttgagcaacatcagccgccgtctcccacggattattgataacctgctcgttaacctgtgttgtattactcatttggcgtctccttatctaaggcttgcagcagcatggccttggaaataataccgatatagttgttgtcctcgcccaccaccggaacggcgcaaggggcttgagcaacaagtgaaatcaactcattgagcggcatatcagccggaaccggcgctggctcagccaataaggcatgatcgagcggctggttttctgaaagagcctgtttcaatgaatctatcgataccacgccgataaatttttgcccgcgttccaacacatagccgtaatcgcggtcttcatcctgaagtagttttaacgctgaacgggggccaaatcctggagtcttgcggattaaggccaccggacgacgacgagcaatatcttttgcgctaaatacgtgactaatatcaacgccacggaagaaggttcttacatattcatttgccggattattcaatatttcatccggtgtaccgacctgaacgacttccccgccttgcataatggcaatacggtcgccaatacgcatggcttcgtctaaatcatgggaaataaaaacgatggtacgctgatgcttggcctgcaatttcaccaactcatcctgcatctcagtacgaattaatggatctagcgctgagaaggcctcatccatcaataatatgtccggattgtttgccattgctcgcgctaaaccaacgcgttgacgcataccgccagaaagttcatcgggatatgaataagcataattatccagactgacctgacgtaacgcctctaatgctttttcatggcgttcttttagcgggactccggctaattccataccaaaggctgtattatctaacacattcagatgaggcattaaggcaaatgactggaataccatactgattttatttcgccgaacggtccgtaatgcactgtcagatattttggcaatatcttcaccatcaataaggacttcgccgcgagtaggttctatcagacgattgagaaggcgtaccagggtggatttaccggaacccgataaccccatgatgacgaatatctcgccttcttcaatggccagactggcatctttgacgccaacggacaaaccggttttactaaatatctggtctttattcatgccagattcaatcaatttaaaggcccgatccgggtgctcaccaaatatcttatataaattttttacttcgagtttaattgccatgcagtgggtatattcctctgtcaattcttagattatattttttcctgatgcaaaaatagagcgccatataccctaacatactgagagtctgaggcaaccctcaatattccgataatttatttgatgttgttaatcatgactttatatatgaagtggctcatttgatttagatgcgttaatactggggttgtttgagatgatatcgcaggtaaatataagatattttttatgccaataatgagtgtgaaatgttttctatagagatgataatatggcaatgtttttatcgctgatatagacagatatttgacagatatatcagaggatattgtctttgatgataaacatatattagtgcgattaatctatggataattggcgtggcggaaattgctctcatcccttttgtgctctgggtataagcccaacgagaattttcttggcaaggctgattttgacgtgatttttagctaaacagacggatctgataggcaatttttatactcatagcgaaaggaaatttatcggggcagggtagcgatctgttattacccctcgctaccctccagacagggatctccctgttagtcagaaagaccttcagccgcgttaattttccgggatcaaaaatcccaatcttcatcctctgtcgttaccgcttttccgatgacataagaggaaccggagccagagaagaaatcgtgattttcatcagcatttggcgataatgcagacaaaatggccgggctaactttggcctcgctggctggaaatagcgcttcgtagcccagattcattagcgctttattagcgttatagtgcaggaatttcttcacatcctcgctccagcccacgcaatcgtacaaatcttcggtgtagcgcacttcgttatcgtataaatcctgtagcagatcgaaagcgaagtttttaatttcctgacggcgagcggcatcgaccttttccaaccctttctggaatttgtagccaatatagtagccgtgtaccgcctcatcccgaataatcaggcggatcagatcggcggtattggtcagtttggctcggctggaaaaatacatcggcaaataaaaaccagaatagaataggaacgattccagaaatacgcttgcaaccttcttcttcagcggatcctcgtggcggtaatggcttaggataatctgcgcttttttctgcaacggaccattctcttcactccagcgataagcatcatccacatcagacgtcatgcacagagttgaaaatatcgaactgtaagaacgagcatgtaccgcttccataaagctgatattggaaaataccgcttcttcatgtggggtgattgcatcctgtagtagtgcgggcgccccaacggtattctgaatagtatccagcagcgtcaggccggtgaatacgcgaatggccaactgttgctcttggagcgttagagttgcccaagagggaatatcattcgacagcggaattttttccggcagccagaaattggaggtcagacgattccagacctccagatctttatcatcttctattttgttccagttgatggctttcacgcgggataaaggttgcgtagcgatcatattcttgattccttttataacggcggcctacagtgagcaggagacgcagccttcaacttctgtaccttccaacgccatttggcgcaggcgaatgtaatagatggttttaatacctttcttccaagcatagatctgggctttattaatatcccgcgtggtggcggtatcacggaaaaatagcgttagcgataacccctgatccacatgctgtgttgcttgcgcataggtatcaataattttttccggcccgatttgataggcatcctgataataatcgaggttgtcattggtcatataaggcgcagggtaatacacccggccaatcttgccttctttgcgtatttcaatccgcgatacaattgggtgaatgctagacgtagcgtgattgatataagaaatagaaccagtcggtggtacagcctgtaaattctggttatacagcccgtgctccataactgaatggcgcaaagctgcccaatcatgctgggttggaataggaatccctgcacttgcaaacaatgcctgcacgcgtgaagtttttggctgccagctttgctcaatgtatttggtgaaatagcggccggaagcatactgtgaatcatcaaaacctttaaaacagctgccgcgttcaatggctaattgattcgaggcgcgaatcgcgtgataggcaacggtatagaaatagatattggtgaaatccagtgcttcttcagaaccgtaataaatctgttcgcgagctagataaccgtgcagattcatttgccctaaaccaatagcgtgagattcctgattccctttatcaatagaagaaaccgaacgaatatgactcatatcggaaaccgcagttagcccgcggatggccgtttcgatggtttgcgcgaaattctgcgaatccatggtatgagcaatattcagcgaaccgagattacaagaaatatctttgccaacatgtttgtaactcagatcttcgttatattccgttggctgattaacctgcaagatttcagagcataggttgctcatgttgatccggcctttgatcggattcgctttatttaccgtgtcttcaaacatgatgtagggataaccggattcaaactgaatttcagccagaatctggaaaaattcacgggcgcggattttgcttttgcgaatacgtttgttatccaccatctcacggtatttctcactgacgctgatttctgacataggaacgccataaacctgttcaacgtcataaggcgagaacaaatacatttcctcgttctgcttcgccaattcaaaagtaatatcgggaatcactacgccgagagacagcgttttaatccgcactttctcatcggcgttctcacgtttggtatccagaaaacgcaaaatatccgggtgatgggcatgtagataaacagcgccagcgccctgacgcgcacctaattgattggcataagagaaagcatcttccagcattttcataataggaataacgccagaagactgattttcaattcgtttaattggcgcgcccacttcacgaatgttgctcatcaggaaagcaacgccgccgcctcgtttggataactgtaaagccgagtttaccgcccgcccaatggactccatattatcctcgatgcgcagcaggaagcaggaaaccagttcgccccgttgtttcttgccacagttgaggaaggttggtgtagcaggttgaaaacgaccagaaatcatttcctctaccagatttctcgccagtttttgatcgccggcggctagtgtgagcgccactatacaaatacgatcttcataacgttccagatagcgctggccatcgaaggtttttagcgtatagctggtgtaatacttaaaagcaccgaggaaagtcgggaagcggaattttttagcataggcttgctggaataagcttttaataaagctgaagtcatactgttccagcacttctttttcgtaatagccttcttctatcagataatcgattttttcctgcagactatggaaaaacaccgtgttctgattaacgtgttgcagaaaatattggcgcgcagccagacgatctttatcgaattgaatttgcccatccgcatcgtaaagattgagcatggcgttcagcgagtgataatccagttcgctggttaatggggctgtcattgtgagttctgtcgttgccaaaattcggttactcccttacgaacatttgccacatcttcatcagtacccaacaactcaaagcggtacagataagggacctggcatttgtgggagataatctcgccggccaggcaataggcatcgccaaaattagtgtttcccgcggcgataacgccgcggatcaacgcgcggttatgcggatcattgaggaaacggataacttgaatcggtactgcaccgatcgaactgccgccgccatagctgggcaccagcaaaatgtaaggttgctcaacctttaatttttcccgtgctccggcaatcggaatgcgtatggccggaagccccagtttctccacaaatcggtgggagttctccgatgagctggagaaataaaccagcggattcatcatcgtcacctctgtcagaccgcaacgttttgactcagggcactgattttatccggtcgaaaacccgaccaatgattgtcacccgccacaatgaccggcacttgctgataaccgagggatttaatatggttgagcgcctgggaatcattcgtaagatcaatgacctgatagttaattccatgacgatctaaggcgcgataggttgcattgcactggacacaatcgggcttactgtaaataataatgctcatgattcgcatttaccttttgttttgaggtaaggcggataagtcagaaatgcgaagaacgctcgcggcctgactccctctttatcccccctgacagtattgccctgagcgacaaacaaatactatatgtagagttttattatttcaaccgcactatatgtagttgttttgatgtttttggaatgattagacagcgaagcgccgccagccttgggctagcggcaaactggcgggaataaaaaatatttttccagtaaatggttggaaaaaggctgaaaaaagactactggcgcaagctaacggccaggcggttaaaggcattcatgatgctaatagtaaaggtcagatctgaaatttctgtatcgctaaaatattttttcaataaatcaaaagcgttgtccggcgcaccggttgtcgcgatatgggtaacggattcagcccaggccagtgcagcgcgctcggcatcgttatatgctccgctgacctgccatccggctaacatatcgattttactttggctgacaccgctgtcgcgtagggctttcccgtgcatattcaggcagtaggcacagccgttgatttgtgaaactcgcatgaaaatcagttcaatcagggatttgtcgagagaactattttccagcgtcatcaaggcattcatgagtgcttgataggtggaagaggacagctgagagtaattaagacgttgttcgatcatggaaagtaccttctacaagtgcagtgacgttgagagcgactctaccaaccccatgacctatactatagtggcataacttgattttttttatgggtcatgatgatgagtattcccgttcaattgcaggttgatcgtcagcaaaatgaacctgtttttcgccagatttatctgcgatttaaagaagccataacgcaacgaatactcttgccagacacccgagttccgtcggttcgcgctctggccagcgatctgggcgtagccagaggaacggtagaaaatgcctatgctcaattgattgcagagggctatttacaaagccgagggcaatcagggacttatgtatcagaccaactgccaagggtgaccgctccaatccccgccgagccgtcaaaaccgcggccagccgctaacatcaaccacgcttttgctctggaaacagaaagtccgctaccttttcaactggggctaccagcccttgatgcctttccctatgggctgtgggcgcgaattgttaatcgacaggctcatgccgcgactcgcgcttcattggggcatccgccagctaccggactctcagttttacgcgaggcaattgccagttatctccagctttcccgcggattccattgcttaccggaacaggtttttatctgctccggttatcagtctctgctggatttggcgatatcgacgctgttgcttcccggggatgcggtttggctggaagatccgggctatccggttactcagcagttatgcagagaggcaaagctgcgccacgagccgattccgattgatgcggaagggatgaatctgggtgcagctatagccaaagtgcctgatgccagagctgctattgtcaccccggcacatcaaagtccaacgggcgttgccctgagtctactgcgccgcttggcgctattggagtgggctgctgagcagcagagctggattgtagaggatgattatgacagtgaatttcgctatcaaggtcggccactaccgtcgctaaaaagtctggatcgtcaggggcgggtgctatacgccgggacatttagcaaagtaatgtttccggcattacgtatagcctatttggtggtgcctaaggaattagttgataagtttactcagcgttgtcgattgcgcgcctgtaccgtgccggtgctgattcaatccagcgtggctgaatttattcgtcaagggcatttttaccgacatttgaaacgaatgcggcatttgtatcctgaacggcgggcatggttagtggcggctttggagagccagctaggtgatattttgcaggtcgaagagcaggctggcgggattcagctattggcacgtttggataagaattacagcgatcggctggtggctacgctggcgcatcagcagggattggcgatacaggcactttctgattggcaaatagctatttctggtagcaatggattactgttgggctttaccaatttgcagtcagcagatgacgcgaaaaggcaagtatctcgtttggcatcgattattcggcttatggagagagaatgatgcctaagatcggataaaacaattcgacccacgtccaaaaggcagtgggccgaaaaaagagctatctgctagcctgcgactaacgacgcgacaataatacgccgagcacgacaccgactgcggcaccaataccaacgccctgccagggtttgtcacgaacgtagctgtcggcgttgcccacgacgtctcgtgcatgttgggtcagtgaggtggaaccgctaaagcgcgctctggcatctctcagcacgccttctgcattttgacgaactttttccagctcttctttggttttatcaccggaagagcgcaggacatcatcgagagtatctgccagcagatttacatcttgatcgatatttcgttcaactttctctgatttcttgaacattatgctctccgttttacttagtagacattaagcatagtataactttggctaataaaagccgcttacagaagaatcctaagagctatatcaacagccggcggcaataaaatccccgctggcactaataggaatgactgagctgaacagtaccaaaccaaacagtattaatataaatccgcctattaccgtggcaattcgtgacgcatgaatcagtttccccgccagtaactgaccgtggctagagataaatttttcgcgggcatgataaaccagcgttgcgacgatcattattgatagtgatgtgcccagcgccatgctcattgcggcaataacaccccaggtaaacatgcctactgcattcgcaaaaactaaaatcaggatggcaccgctacaggggcgaatgccaattgaggcgatgacccaaaggtaatttttccaatctccattcagttcttctgctagtggcatatgcttatggccgcagccgcagtcgacttgctgatgggaagaggaggacgctataggcaatttactgatgcctatagcgggaagaggaattatttggtgaatggcgaggcgcttttctttcttataaaggcggaataggctaatgcctgaagcgcgtagcattaagactacgccgaacaacataataaagaccgcactgcctttctcgacaaaatagcggctgaggctcaaatctcccattgagagattaaaaaagactgccagaatcagcacgaacaaaatagcaacaacgccttgcatcatactaccgaggaaagtgattaagcggctggtgttggctttttcgcgattggtagacaaataggtcgtaataacaaacttgccatgcccaggcccgacggcgtgtaaaaaaccgtaggtaaagctaaacagaaccagcatcagcccggctccgttctgattattttgttgctgaagcagatacatcactagataacgatgcatatatatctgtaggttaatgcaatattgaacaaaatcagaccaatgccagataagggtggctaatagagctgtcattagcagagcggtcagcatagcgccggcgactgaggttcgcgtaagtttaatgttcgcaatcatgatggggtgatccctgctattgatatcaacaggtggtaaatcctgtttttcccttgctccgccgcattttacccagaggatacagtgagacgagctgcactgaattattattactacatataagttatggcggataaatattgtcgacgaattttgcttttgtaaaagaatatatcgtctgttagatgctcgatgaagcgtgaaaatcagcattagtgccaggttgtacatttggttacttaacgaaaccaatgactcacggaaaggaaaaatagcttcctctatgattctttcaacggcccgacagggcttagcgaaacaaactctgaggaattacaaatgaaaaaagtattagcgctgatcgttgctgcaactatgggtatgtcttctgttgctttcgctgctgaaacagctgctgcaccagcgcctgttgctactggtaccaccgctgcggctcctgcggcagagaaagcggctccggccaaggcaaccagccacaaaaaacatcaagcgaccaagaaaaccactgaacaaaaagcacaggccgctaaaaaacatgagaaaaaagcaccggctcagaaagcacaggccgctaaaaaacacgagaaaaaagcaccggctcagaaagcgcaggctgctaaaaaacacgtaaaaaaagctccggctcagaaagcacaagccgcgaaaaaacaccacaaatcagctaagaaagccgccgttgctccagcagcaactccagcagcataagcacttctgattacagttgtctccaggtttgccaaacctcaacacccggttcttccgggtgtttttcgtttctatccgctgggaatgattcaaataccgaataggttacctgctttcctttgagatcgttaccgtccgaattttcatctcccgcggatattatcccgccaaagtctcgtgtaaatgccgccacagcagtttgccgtccgttgttttatcgaaaatcgccgttgataaacgacgatgtatcggttgatgaggcattttttgctgttccagataactgaccactgcgccttgcgagttttcctgaatcagtgtcatttcggaaagacgaatagttaaccccggcttagccgcagactgtgcccgaaaaaagtggcatagagcggaataatccaacgagtgaccggtcagggtgatcatggtgtactggggtgaaaagtccccgagtaaatgctcacaaacctccgggcaagtatcgctaccgctaaaccactgttcgataagctggtgggtgctgctgatgagaccaaaataggggttggcgttattcatattgattcctgtttgatgaaggcttaacgattgcgtaaatcacgtaaaatagacgtattagtcatacggctggatagccataggggtaataaagccgatgttgccgcgagtaaaaaacaccagtgaaaagcctgcgttgctggctggcgtagcgcggggttatccagtgcgccaacgccttttagcgccaacattaaattgagtagcaggctaagtaaggcaacgccaaagccgaagcccatttgtcgattgatgttccaaagtgcgctggcatcggccaaatgacgtgtttctgtatgcaaaaaagcggtgctttgtgcggtacagctgcacaagctgccgccaaaccccatacaggcaaaggcgatgaacatcgatggcagttgttccgcctgaacgatgttggttagtagtaacataccaatcccttgtgtcagacaaccgcagataaacagtggtcttggcccgattcggttaaagatttttcccgttaaagtaatggcaataaaagccgcaatggaccagggaatcatcagtaatccaacctgtgaggcactcatccccaatatattttgtaggtacagcatggtaatcatgctaacgccgatgaaaataccgggaataaacagataaaccagcattgagatacgcatcagcggctctttaatcaaactcaaattaagaattggctgagaatgagccacactgtgacgaataaaccccctcaacatgataaggcctaaaaccactaacagagcgccagaaattccgtgttctggttcactcaaacggcttaatcccagtagtaatagaattaataccgccgaacctgaacataaacctgcgatatccaacggcgattgttcggttttcctttcctctggttttaaccagataatggagagagtgagtgctaacagcgcaaggggcagattaagataaaatatccaacgccagcctaaggcatcgacaatcaagccgccaaccgccggtgatagcgccggagctaacaggccaaccaacataatgacggaagagagaccggctcgttcatcgggacgataatattgataagttaacgtctgacctatcggaattaataagcctccgccaaatccttgtaatactcgccatacgatcaataactcgatagaacctgcggttccggctgcggcggtagcaagtaaaaataacagtaaagaaagtaggaaggtacgccgtgcacctaccgttttggtcagccaggcgctcaagggaataaccagagtcagccccagaatatagcccgtgcttacccaggctaattgactgatactggcgtgcaaactgcgggcgatatccggataagccacattggcgataaacatgttaatcagatcaacaaaaaatccgagtaaatagacgattgcaactttagtacggtatgccattggagcctccgattgaaggcggggagtgtatctccgaggctatggctgataaatccgcacaatgcgattacactggtaaaaattttttgacaatctgggcggcaatgcatggtcagtttgcatcgattgggtacttttgttgcggtagtgaatgcggggtcattcactgcggcggcagatattttagggcagacgcgtgcggtggtgagcttcaatatcaagcaattagaagctgagcttggcgttgctttactgattcggacgacgcgtcgcctggcggtgacggaggtaggcgaacgtttttatcagcattgccagcgtttgttacaagatgctgaatttgcagtagaagatgcccgacgcggccacggtactctcagcggaactttacgtattactactacgccggaatacggtattcgtactttggttcctattatggcggcctttatgcgccagcatccgcatttgaccatccagcatgcttgttcttcgcagcatgccaatctgatctctgaacgttttgatgtggctattcgccttggacaactggttgattccagctatcgagccgcattgatcgaaacattccctatattacctgtggcttcaccgatgtatttacgtagtcacaaaataagttgtttagaggatttgcggcaggcgcagtgggttgcccatagccgtcttgccacgccgttgacgtggcaggtacaagggccggataacggctggcaactgttggatgttaccgagcagcctaaagttttggccgatacctcggcttcactacaggtatttgcccgaaaaggtgcgggcatcgcgttgttaccggaatggctggtggcggaggatttagtcagcgggctgttgcagcaggtattgcctcagtatcgttttccggagcagggggtttatgccctgtatcctaatactcagcatgtatcggaaaaagtcagggcatttatcgattttcttcgccttagcgtaaaaatgaagtcagcttaaaagccaaaagttttaccaagcatgaaacgtagatcgccacacagtcattgcctttggcgcagcaaaaccactctccatgtagactattctgaaataacctgtttgaggcaataaataggttatttcccttatttattgcggtaaggtcgctccaattgctgtcggaaggagggataataaatgtatttaagaccagatgaagtggcgaaagtcctggaaaactctgggtttgagcgagattatgtggtcgaacaggcctatggctatcgaaagggcattcactatgtgtatgttaatcgggaagcacgcatggggagaactgcactggttatccatcctgcgctgaaagatagaagtctgctgtttgccacgcctaccgctcccattcgtatcagtgataagtaccatgagtttccgctctatctggcgggagaggccgaagagcgttatggtatttctcacggtttcagttcgcgggaattactgcaacgctacctgcatagcatgttccaatagctttatacttcaatgacttttttgccctaatcggcagaaatagcctcaagcaaaaatctggcgcgccgtatccatccaatcaatgcaatacggcgtctgattcctggttgaaattcatattgtaggtgcgcctgaattgagccagttcgaaggcgtctatatccaattcagcaaaatagaacaaagcggcttctgtatgctctgaagttagcgttggcggaatatgcgcccgcagcaacgtattgcgccattgcgccacgttttcatcggaagcgtctttgataaaagtttgataaataaaaataagataggcagcttttcgcacatcctcagcataaccattgctgatggatcggataaacatttgcgtttgacggtttcccatttcttgcagcatcgattcgatataaatcggttttatcttcaacaaagtagctaaagtatctacggtttttcgtgtatcagacgttaagactcggtaacccacaataaaaactacaatgagtacagcaatgattatccatgtcattattatatctttcatcaacttagaataattaatcgagtagcattctcgtcgcaaatctgaccttttggcaaagcttagcgatgttcgccgccaaaatttccttgagattgctgcacagagttcaaatgacggttaaaagaagcggcgtctttggctaatgcatcgagatgtgcgcctaacattttgatttgctttactagctgatgttgttccggcaacgaattagcctggctcaactttttcagcagtaaatcattttgtgtttttaggattgcttcacgggcttttgactgttccaaggcgtgttgcaacgcttcatagctttcctgccatacctgatgctgtttctcgaacgttgactgcaactcattcattgcactaagaaacttcacttccagctcgcgcattgtcattgtttctcccttggcatatcccgattatcattggcagtataactaaatctccccttaacctcatccgctagaatttatctcaccttgcacttagctgaatgggttactcgaaaccagcgagtatagatatttatcataaatcggtgctttggatgtggtttactttttacccatgggttatgcctttgggaaataagtcttgctataaaaaggctgccgtgcgttaataagcgcatcggtttgtaacacagacctatttatgtaagccatttaagtaaagcagttcctagttaaagcgatatttttagacatcacttctccgacgaatttccttctttagtgcccccataagtaattactgataagcagacctctttgccatatgttggctcaaaaaataatgaaggaaatacccctatgtctactaaaatgactggtttagttaaatggtttgatgctggtaaaggttttggttttatttctcctgctgacggcagcaaagatgtattcgtacatttttctgcaatccagagcagcgattataaaactttggacgaaggccagaacgttgagttcagcatcgaacaaggccaaaaaggcccttcagcggttaacgttgttgcgctgtaagtaaacccagcttaggctgcgtttatagttgggaaattgcgatagcgatgatggccatgccggagcagacaatttagttctcgatgagaataccaacaccttgagacctcgctacggcggggttttttgttttatggatattagtgattacgtgttaccccgccatatttatccttttctgaattcttagtgaaaaaactcgatctatattgtgattaggataaatgcatactcagttatcttttttatattcagacattagccacgttcgaaaaagtagaatatattcgaaagcgattgtttaatcgccagcgggctgcttggtataagtacagtctacgcacctgcgggtgcacgatttttacgttatggatatatcaacattttcactgtgtaagggagtagggcgtgaactggaatgaaatagcaatatcagcggtaataggcgctgtattggcaggcgtggcttcgctgttaaagaaaaatggaaagataggtaagttttctggagttatgttggttatcatccctattataattggtaattttttttattataagtatattaaccagaatatcgatcgtgctgaagtggaatattctctagggaaatttgctgtttaccaaacaataaagcagcaagaccctacgctatatactaatctggttaaccgtctggttgccttaaaatctggcggtagctcagaacaagacattattgatgaaattaagcaatcggtcgccttgctgacggtaagtaaaattcaaagcgctccggataagaatgttgttgaatatatgaacattattctggatgagcttcatttttatcaggaaaatgacaaaactcatcagctttgctacaaagcgctttatccacaggttgaaggcggcgttaatacggtaaaagaattacccgccactttagtacaacgcgatctggaagcgttgaacaacctgtttacagcatcaaccggaaagccaataaaaccagagaatgagcaatataaaagccaactggaagccattgtgcagaaattgcatcagaaatatggtgatgatttactgatgctgagtaatccgaccgctgccaatgtggaccgtaaaaaggtctgcgatatggctgttgagctatacggcaatgtattgcgattgccacaaaaagaagctggaactatcatcagaacgatgctggcaggcgaatagaaccgagacagtgaaacagccaattgctttacagacaggtaacaagccattggctgggaatatcattttacggggtagttgacgaaaattaatcgtgatattttttaattaaataattacggttaatcataaagttagaatgttaattatcacgttatctgataaagactccccatactgattgagatacagataatcttaatcagtatggggctatatacctcaatttttgatgtgaaacatacctaatatccatttgataatttctaatattgatttgtgaattgtgagattattctgaatgcaaatcaatcatttcaagacagatgtctaatgtattgcttcttgcctaatggctaataaaagacataaaactataccttaatccaaatttatcggttttactgctgattaattattgaacttatatccgctgagttagtgtcactattttttaataattaaaataatcacaataagacgtaacattaatgttatattaatctggaaaagttgaagtttgactgattccctactaatgctgtgtatattttttgttatctaaaatcatagtgagcaaaaatagttattcattttgtcattagtggaatttagcttcaccaccaggtcacagacttaaattttcacctgcatagattaaaaaacaaacaaatagagatgtaattcaatgagaaaactactcgtcataattttctgtttgaacttgtttgccgtaaccaaacaagccgcagcagaagatggaaaaaccgtagatgttgtattaatcggcggcggtatcatgagtgcaacgctaggcacctatattcaagagcttgagccaacatggtcaatcgatatgttcgagcgtttggatagcgtagccagcgaaagctcaaatggctggaataacgccggtactggccactctgcattagctgaaatgaactacacgccagaaaaagacgatggttctattgaaacagcgaaagctattgagattaatgaagctttccagatttctcgtcagttctgggcctatcaggtaaaaaataacgtcctgcacgatccccgttcatttattaatagcgttccgcatatgagttttgtatggggtgacgataacgttaatttcctacgcaaacgccacgcagccttacagcaaagtacgttattccacggtatggaatattctgaagatgctgagcaaattaaaaaatggatacctttggtaatggaagggcgcgatcctaaacaaaagatcgccgctacccggatgccaattggtaccgatgtaaactttggtgagattactcatcagttagttgatgcattgtcgaaaagcgataatttctccctaagtctgggtcatgaagttcgtgatattaaacgtaatgcggataagacctggagtgttaccgttgccgatctaaaaaatgatggcaaagaacgtacggtgaaggccaaattcgtctttattggtgccggtggcgcatcattgccattactgcaaaagtcagaaattccggaagcagataattacggcggtttcccggtgggcggcgaattcctggttaccgataatccggaaattgtgcagcgtcatttagccaaggtatacggcaaagcggctgttggttcgcctccaatgtctgtcccgcatttagatacccgtatgctggatggtaaacgcgtgctgctgtttggaccctttgctactttctccagtaaattcctgaaaaatggttctctgtgggatttattcggtactatgaccttctctaatatcatgccgatgacccatgtaggcatagataatttcgacctggttaaatacttaatcagccaggtaatgctaagtgatgaagatcgttttgaagcgctgaaagaatatttcccggaagcgaagcaagaagattggaaactgtggattgccggtcaacgcgtacaaatcatcaaaaaagatgaagagaaaggcggcgttctgcgtctgggtactgaagtggtcacctctcaggatgggactattgccgcattgctgggcgcatcaccgggggcttcaaccgctgcgccaattatgttgcacctgcttgaaaccaccttcaaagataaagtggcttctgaagcgtggcaggctaaattaaagcaaattattccatcttatggccagaaattgaatggcaacgtggaaatgaccaatgaaattctgggctataccagcaccgtattgcagttggataatttagcgccgcagccagtggttgaagctgaagttaaaaccgaaatgaaactggaacccgtggccgaagctgtccactgattggttttaaacgtaccaatgatgctagccggagagcgatcgtttctccggcttttttatatcaaaaataggctgattcttttccttttcatgctgattgaggcgagtttccctcagatattctgcggattaaatttacccaaggctacacaaagcataaactgcggtaagaaaaaaattgcattgttacgcggtaaaataaaataatactcaccggtcatctatcaatagaaaggaatcttatgtctggtattttatttaaaactctctcggtattgtccttgagttttctcccgctgcaatcatttgcggatattgcggtaatcaaaaaaaacaatatcaaaccgggcaatatagaatatgccaaggtgctgtactccggcgatgtgacggaaaataagaccgtagaattcatctctgttctcgatgaaatcaatgctaattacccaaaactgaaaaaaatctatgtctacatcaatagttatggtggtgatatggacagtggctatatggcttatgaggcgattaaaagctcaccggtcccggttactacggtgaatttatctatggtcggttcctctgcaaccttattttactgcgctggtgcggaacgtctatcaatgaaaggagcttctttcctgctgcaccctgccgccgtggctaatgaaaacagcaacttcctcaagcctgacgcactaaaaaatatgcaagaggcggtgagtatatataacaatatgttcgatacggtttataaagaatgtaccacttacaccgatgctgagcggaaaaatattctttatagtgaaaatggtcgcgctttgatcaattcgggcaccgcgatagataaaaagatagctaacgggcttgccaacggattttctgatgttcagatatcttattacattactgaaaaacccaatcagtaatagtgcttaaggcttcaatgataaaagagagcgctatagctctcttttatttccctgccggggtagatttgtcgcgagagtattagggaaacgacctcgatttcagcgttgtattatttggctaattctcgttgatagcgtggtacagcattcccgacgcaatttataaacataaaacccgccgatatctgcaccaatgatatcctctaagtattgactactatattccagcgcagcccctgaactcaggcataaatatctttctcactgccagtactggggcgttcccctgccgaagaccgtttcttaaatgcactcttaatgcatcctcttcgttataaaaagaagtggctacagcctgataagataataagagaaccaatcccaataatatatttattttctgagattttccctctggaatattatccaaatatatagggtttctgcgttcggaatttctggccactccttattatcagagtggccttttggctttaaagggcgtttttaactaaagaacctgcgccgatttctgcaatatttctcgctccggtgagcgtcatcgctacgcgcatttctttatcgaatagctccagcaaattagcgacaccggcttcaccggcggcagccaaagcataaacaaaagcgcggcccagcatcacgctgtcagctcccagcgcaatcattcgaaccacgtccagaccgctgcgaattcccgaatctgcgaatattttcagatcgccttttaccgcgtcagcaatggctggcagagcatgggcggtagaaagtacgccgtccaactggcggccaccatggttggaaaccacgataccatcggcaccaaatcgaaccgcgtctttggcatcctccgcatcgagaatacctttaataatcatagggccttgccagaattctcgaatccactccagatctttccatgaaattgaaggatcgaaattagtcccaatccagccgatataatcttccagattggtcggcgtaccgcgataggccgatacgttgcccaaatcgtgcggtttgccgcatattccgacgtcccatgcccattgcggatgagtcatggcctgcaaaatacggcgggctgccgcatttgggccgctcatgccggaatgagcatcgcggtaccgcgagccaggaaccggcatatctacggtaaatactagcgttttcactccggcagctttggctcgttcaagcgcattccgcataaaaccacggtcttttaagacgtaaagctggaaccacataggccgatctatagccggtgccacttcttctatcgggcaaaccgaaacggtggatagggtaaatgggatcccttttttagccgccgctcgtgccgcctgcacttcgccacggcgtgcatacatgccggttaaaccaaccggtgccaaaacaaccggcattgacaaagtttcatcgaataatctggtttccagactcagctcggacatgttttttaacacgcgctgccgcagtgcaataccggctaaatcttcggtattacgccttaacgtatgctccgcgttggctccaccgtcaatatagtggaacagaaaaggcggaagtttagcctgtgctgcggcccggtaatcggttgaagcggagataatcatgatctgtaccttagtttgaaacgttaacttaatttttactctcagggagccagaatcactgccattcctgcggctatcgcaccgtaaaccagcatgggcagaagcgtttttttgatgattttcccctcggcgttactgaggcctaaaatcgaacaaacggcgataatattgttcaggcacaccatattacccatggctccacctacggattgtagtgccagggttagattgacattcagcccgctgctcagcgctatggattgctgaatcccgccgaaagtcaggttagacacggtgttcgaaccggagaaaaacgaacctaacgccccaaggaatgaagagaacatgagccaactctcgccggtaatagctgctaactctttaccaattaaaatgacgggagcgttgtcaccgcccagcatcatcatattgaccattaccagcgcaccgaagagggcaataaacggtttggatatccgtgatgcggtttcgctaaacatatgtttaacctgtgtgccgctcagcctaaatagcggaatacacagcagaaccactaacaggaaaggtatcagcgccgggacatacagggttttgtaacccgcagctgcagaggttcccagcacttgttgtaagttgataatcaatgccttactgatgcttagctcacctagccagcctaagctgccttgccatagcgtagccgtattattgagtaacgcttttagccctagctgatgaatgcgggtgacaatcaaaatggcaatgagtagcaaggtcggtgtcatggctttgatcacctgcaagaaaggaactgccgttgccgtatcttttctatccgttcgggttagcccgattcccatacgtgccaacaatactgaaagcgctagaccaatagctccgcctatcaatgcggggaattcatagttaacttgcgctagcagtaggtagggaagagtgcagctcaatacgctgagatagatgaaaatcaggttgccgcgaatttgctgccaagaaacgataaaacgtaatgccagcaatgggatgacaaaagcggcgacaaaatgaatcagtgcggtttgacggccgatttccagcaggctttcatcggaaagaccgaggttagcgaagccgaaccaggtaggcgtgccgacggcaccgaatgataccggcaccgagttcataatcagcgtcaataaggctacgcgtagagggttgaatcccagcccaaccagtattggtgccgcgatggcagccggtgtgccaaatccgctggcaccttcaatcatgaatgcaaatgcccagccgataatcatcagctgagcaactgggttagggctgatattttccagccagttacgtaccacgttttctgcgccgctaacctgcatcagcttattcaacaaaattgcgccagcaataatggtgataggggtaaatacggaaactagcgcggtaataatattggcgtgcagcaacagcggcgcgctgttgaaccagaataattgcacgcaataaaccacgacggcggtcagtggcagagcgatataggatgggattccgttacgcctggtcatcatccaaatcaacagaacgattggagaaatactaaaaaaaagggacatatcatcctcagggttattatttttttagatggatagagatgtagccaaaaggttaattagctaaacattattattctaatcgcaacctttgcagatgtactacgctgcattttcgcaacaattaattagtgtgaaatttaggcataattcaacaatccattcaggaaatttattttcaaataacttttaataatcagattgttagattgtttgttttgtgtgaggaatgtgttggttcacattaattaggcaggattaggccatagactatatccaaaaatggcctaatcatcggggggaatctagcgggaaaatggggtaatcagatgatattttcaaaaatagtggctgatattcttataggaagtaatgatatgctcgatgagcaggcgggttttcaacggtaaattacgggtataaggataaactgcataaacgcccaaaactttaccgcagtggccagccagaatttcgatcaattttccgtcctgaatatcttcatacaccatacaacgcggcaccatagcaatgccgtgaccgctgataacggcttttcgaatggctctggcattatttactgacagatttccattcacctgcatttcatagatttcgctgctaccgggttgtttcattaaccagttggctgtaccactttcctgataggtgtaagtcagacaattatgattaagcaattccttcgccgaacgaggttctggatgcagctccaaataaccgggtgaacagacaatgacccagcgagaatcgagaataggacgcgcaatcaggctggagtcaggcatggtgccggtgcgaatagccagatcgataccttcgttgaccagatcgacaaagcggttttccagccgcatttcaatcttcaaattaggatgttggctacaaaactcggccacgcattcgctcagcagtaattctccagaaatagtgggtactgacatacgaataacgccagctaactcatcacttttttcactgaccgcatacaaagcatcctgaattttggtgctgatttcgcgtgcatggcgatacaacacctgaccattttcggtaagtcgcaggctgcgcgtggtgcgataaagcaggcgggcacctaaagatttctccagacggccgatacgtttactgaccacggaactggtgataccggcggcttcggctgctttactaaacgaaccgcaatcgacaattaatacaaaaagaatcagatcgttggcatattcgtgagtgggtaacatagcgtcctattcttctgtggctccactgattgacacagtgtaagacctcttggtcaggaagcaatatgcattggttatttggttgaggtgataggtaaagcctgtggtgttcaatatctgtatgattttattaaaccaggtgtgtaagaaaaataatggtaataatcttttaaattacattcaacaaacttaggctggtcatagtaattacatcgctattttttatttcttaaccgaaagcatataagccataatttaactttactcgctttaaatatcatattaacttactccacctatgatgttaatcattaggataatttccatgtgagaattaaaaaatcatatctgtaatgagcatttccatcttcaagcagttttctcgtgagaaaacaagcatatctctggttgagttcttggttatatcctttgtaataacaggagtgaggctgtatttttttcgtgttatcggaaaataataaagcatcgagaaaatttttctgttggatttctttcacaatcagatctttattgatgtcatcatgttttaatccagtcgtctttttcatatcatgaataaaggttctagcactgtcatcagcaacattaattgtctggcggcctgaagccgtaattccagatagctgtaacccccccaagggccaaatttagcgatataggtaatcttcttgttcaatctggccagtctggcggtgggatcatcggctggtcgatatttttataccttattgatttatggcttatatagaatagaaccgcatgacctccgataaatcgggataattgagacctatcactaatattatctgatggcgaacaccgcgtagcgaacagagaggaggggactaaattctgtttttggcgaaaataagcgtcaaatgatacttttttcgccgggttttgggttgtctgaattgtattaaaactgccgtcacagccgtgactatcgccggacagtggaataaaaacgttcccgctgcctaaacatcgagtgatctactgtctgtattattcaattctgactcggaaataatatattggattagctgatgtaaattagttattttctgagatgtcaataactcgggttttaactcaatattataatctttttgtatattgaattgaaactctacaaaatcgaggctatcaaagccaagttgcctgaaatcagcattcggagtaatttgatcttcctccagatctttcatggtaagaatccaatctttcatcgtttcaaaaacctgattttcattaaacatagcttgtccttttaatggtttataatttaagtgttattatttagactgaatttgaattcctatatctgactgcataacaaattgtccattgataatgactttaagttgaaataaagaagaaataatattttgagaagagctaatcataatcggttgacataatctaaatcgaatgttgagagaggaatccaggcctgatattttcactttaaagaagtcgggtgcaaccaaaaccctatgggtggtttgtaatactctcagttcagcgaatagatcgctttgctgctttatttgtgggttattaagtaaatggcaaatgttaacaaacagaaattcactctgcgaaaaacgagtgaaaacaagagagtccataaaaagccacgcagagtcgaaataggggtatgtggtttcgaataatgcttttttctcctcatatagcgagtgttcaatgagaacatcttctggggaatattctgtgattttctccatgggatgcgttttataccggctgcccgtaatagcttcacaagatctatcttcagagaataagagaaagtaatcacgctgatttttcttttttattgccaattcataatgaagtttttgtaataccggtgaacggaataaagtttttatcgcaacccaatcttggttcggttgtatatcatctagacttaaacgatgttggatatgcattaaagctaacattccatgggcgacaatattcgcagaacccattgcctgagcgtgagataagctaaagtgaataggattatagtcacctgaataatcggcccagtctgcaatagcttgttcatcgaagtagagcttcatatcaacggaacctctcaatgactagcacggcattggccccgccaaaaccgaaacttaggtttagtgttgtatccacgggactgttctttttatgcgtcagcggtaagtaattcagatcgcataagggatcgggctcgattaaattgactgtggctggcaatatctcggtttcaatcgctttcaggcagataattgactcaaagctacctgcggctgaaatcaaatggcctgagtaacctttcgtactggaaatagggatatcgtaagcggcctgtttaaatacggctttaatcgtattggattcattgaggtcatttagctgtgttgaggttccgtgggcattaatatagttaatctcggttggcgatcgaccagcttgctgtaatgcaaataacattgaatcaattcgtgcttgcatgtctgtagccggggaggtgtaatccgtggcatcggaaaaattgccgtaacccgtaatttcgccgagaattttagccccacggttttgagcatgttccaattcttccaggcaaagcactgctgccccttcggccagtacaaaacccgaacgacgacgatcaaatgggcagcaggcacgacgaatatcgctctgctctctgctaagcgcattcagtgcatcaatattccaaatatttgtttcatgacgtaatgtttctgaaccgccagcgagcatcatttgagcgcgtccctggcggattgcttcataggcttcgcctattgcaatagaaccagtggcgcaggctgcacttatcgtattttgataaccccgcatattccacattaacgtacaggccgcggtggcaatactgggcattgagatcagcgtgcctaatggattaccaaagcccgtatcacgataactatcgcgtagaatatatgcttcatctaacccgccccaaccggtgccaatgatggctccgcattcgcgagccgcgtagtattcggctatggcttcaggttgtttaaacgccataagaattgcttcataggctgcaaccaatgcatttttggcaaaaacaggcagtgcgcgggaaatacgtttaggaataaaaccatagcgttcattatattcaggtaaaaatgcaaagaatttagctttaattaacggattcttaaatgcgtagggtttatagcctaaattcccgttcataatagatgaccatacggttgcgctattttcccccaaagaagttaaagccccataaccggttaccactactctccttttgttcatgccaatacctctaattaatatattaggcggaaatggatatatgccttgaaataatcaaggcataaaataaccactatcggttgctaataaccacatcttgattatttattgtacgaagggagaattgatgcagattaccaaagttatcaataatatcaacagatacctggccattaataataatgttctggttgttcctattattgtaatagttaattgcacgaatatcgccatgtccatgacgtaaattaactaatgcagaagagttatcggatcttatctcattaacacgaaggcttgttctatttctagccatccagccgctggtataacggcccgaatcgaagaatatcctcaagttattacgtaaagtagtattaccagaattaaacgctgtatccgaatggaccctgactcctgaaggtaatgtccaataatacacatcgacctgcgcccaatgccctttagaatcactacgtgaatggccaatatcaacatctctatttagcgcagaggcgagaattcttaatggtggcacgggaaggagagaaatagagctcgaaaaaaccataccatcagcattaaaactagtcgtaataacccggcgttgaagttgattattggcgtcacggaactggatagtcactgcagccataaatattcttgtttctacccgttgatttgatcgcaaataccggaatatacgcgtggcacctgcgaaaggttcggggccagatcgttcggtattattatcgatttctctatccatctcttcgtacgaaagtcctcttataccttgcgaatagccgttgggagcctgatcaacatcccaaccgactggcaggttgtcccgattaatttcgcgaacggtgacgctccttttttcttcatcattgagatcgacattattccaaccgctcccgctgaattcctgtttttgaatcgtgatcaaaactggcatttgttgacgaccgttagcataaaactgattactgccgggtaaagtgatcgtaaactgactaatattcacattattcattttaaaccccgatattaatctttgaaaactgagaagccataaaatggcggtgagatttcctttatcatgtcgactttaactctgtccgttaatttttggtcggcattgaatacttgatgctcaataaaattactgaactgactatctgactcaaaaaaatactgattagcgctagggtaattttcaaaataaactttaactgctaactgcagcatttttgcaaactctatattttcataattgaatctgcttttatctaatacgcagatctcagcgaagccttcttccggggtggttcctccaaaccaaatagaaataaatctatgatctattttaggtatgaaataatatccatccccatcagttgaaaaattatcattaaaaaatacttcttctctgaagtgtgaaggataaacaaattcaataataattttatcgccattgaccattatagggacgcattctctaccactagataaagcatgcacctgtccatgccaattagagttatcggctgctctgaaaatggaattaataatgttcttatcaataaatctcatagatactcctgataataaattaaatataagcctgtattataaaaatacaggctgactggataagctaatcatgcataaataaaagtgatgccaataatcaatatggagatataaaaatagaatatctaggtgctgcattgttttagcttgggagataacaaattaaacttatatagaataaacctcttcaatagccgaagctcggattcggcctacgtggttatcaaattcagtataatattcatgtgcgctggccagcgatccttgcatagtatcaattgcgggtaaaaacggattacttcgtacttcggcatttaaattactcgatgaagaaggtgaggttgttgccaggtcgtgtgaagtattggcaatatcgaaaattgtaagagggatagaagcgacgcctgctacggttcctacgactctagcgaataatcctaatgaactatcgtaattagctaatgcttttaaaccttcgaaaagtcccatgcgggcggcaactgaagtagatgaaattcctgaaaatgtgatgcgttcggcgccgctacctgtggagaaaagaatggtaggcgaacgagcggtctggtaggtgcttcgcaccgttgctcccgctgaacctaagccagaaacaaaagatagcacgccaaatgttagcgatgcgatgcttaggcgttgtattgtgtcacttcgatcccatccggcacgagcatcgacttcttccattgccgccgctgcaattgccagggtgctgctgactattcctaatgcgccgccagtcacgccaagaaccgtggctacggttgcccctgctgccgcaaagccgaccaaagcataaccaaaagtcagaacggtaagtgcagtaccgatgccaattaatagccaggttagccatctcggcatttgaatcagtccactgggatctctgaaattgatgggatcgccgttgcaataaccgtaactattaatacctgctgcactgaatggacttaatgggtcaggtgaaaggaaaatcattagctccggactataaactcttcgtccattgcccaaatgatagagttgagtcattggatccagcttttcgccattgaacgccgggcgactctgctctagcaatgaaatatccagattatctgaatcaattatcgccatgccgtaaggggaataatgggtctgtttaatatcattactctgcccgagagcccctcgaatactggcggcgctgtcgctaatatataattcagtgccttgagtactggtcgtgcgcgccagcacattttcttcctgcctgacaaaacgagacgtgttatttccctggctggcgccaataattctattctcgctataatggaatgctactgtcgtattagcgttggcgctttgttttatttgacgcccctcagcgtcatagtgatagcgagaaatatgactttcattttcagtaacattaattaaacgctctagttcatcataatgataatttcttttaccatcgctgagtaaattaccggaagcatcatagtttaggtgtagtacttttgatggattggtatggcgtatttcagttagctgagtggggtcgcgtccctgaaaactacgggtagaaatatcctcagtaccatctgtaaattggctgataacctgcgttatattatttaacgcgtcataggtaaaggcctgatattgaagactacgcccattttgatctttagaatattcagggccgctgcatgaataggtgattaatctgcggtaggcatcataaaggtaagtctcaccaataatagcgataccttgggcgtttgtgagcatcttggaagcaatcaggccattttggtgataggtggtagttatggtttgtagcaatgcgccattgtgttcgatacgtcggatagattctcgcccagcctcgtcataagtcacccccgttataacattgccctgctgagcagaggtatccacgcggctaattcgactaaaacggtcataatgtgttgtaagatgtaccgaacctacgctggctttttcaattcgacctgcggtgtcataactgcgcatttctttatctcgcagagccgaatcagcggtaattaagcgaccggcaggagaatattgatagttattggcgtggctttgattatcgaataactgtgtatctttattgagatggccgtacgtatcgaaatgtaattcgcgcttaaattcgttattactggtgtgaatcaaattgccagtcactcgatcaaaatcaaattcactcgtcgttacgctgccgagtttaacttgttctaaagaaaggagctgcgcattatattggaaattctgaatgataccgcgtggtgaacgagccgaattcggttgagtcgaaccattaagatatgaccaggttgattctcctgcgttgcctctggattgtttcgttaatctgccaacgccatcataggcgcggctaccaactaagatcccatctacttttatcgcggttttaagtgcttcaattgaatgagaaacaaattcggtttcgattactttcgctgaggttgcatcggcaggtatgtaactttctcgtaccaaacggtcaaaagcgtcataactgaaatgagttcggtggccatcgatatcgacttcagaaatacagcgaccaaatccatcaaaagtgcggttgaagtgatcaacaatgccgccaacgctatcaatttgttggattcgagtggctttatcgaaggcattaaaataagttcgcgtatagtgagtgccttctataccttcagtgcgcactcgttgaatcggatcgtaagcattcacgattacgctgccgtctgggcgtatagttctttctagctccccccaaccgtcgtaagaataaactgaatttaatgctaactcctgtccgctaatatgatcataggctgtttctgaaattagctgacccaatctattgtaggagcggcggcgcagtaatagttctccgttactttttatgacgctgctagacagattacggccaaaaccgtcataacgcgtaatatatcgctcaccttttgcatcatttatcaccatatttgccagcgcgccggaaatggaaaaatgatattcataatgccgacgagcttgattttgtgtattaggcgaggctatttcagtgacgagtttttcattaatatcgtattcaaaaaccagcttaactgcgtcttctttttgaacctcggtcactaggcggttgataagagatatcgtccggttagatgtcaaaaatgtagcatcatacccaacaatttttcggctttcagttaaacgatcaaggttggttgtatagctaaattgtgtgcgagtcgtatggctatttaaagttgccgcagattcctggattcttccatgcaaagcaatattggagaagttctggaggtaggttaaacgggacgtaagattcccattggtcgcacttgaagcgtgcaatacataattggcatttctacggaagttggctatttgtatataagtatgctgggtgactcttgtagattcattgcctgaagagggaaatattctttcttctcttttaaatcgggtaaataaaccgtgtggctccggtggacatagccctgcaatgccgccaaccgggaagtaatcagattcatagcgaataccagaggcttctgtccgagataactcattaccaaaatcatcagagatcattctgatagattcttcacgattacttgagctatttcgtatttcaaatcgcgtgagaatttcttttggtaattgcagattggccggttgatccgtaaacatcaccccagttatatcattgtaagtatatcgacgaatcagcctcctaccctgtttttcggtcgtttcgagcgttttaagatggaatcgattaaaggtaatttctctagattgcagcacgctattgttactgtcgagtatctgctcagtagttgagtaattgtattcgcttctgactaaatacagattgtcttgcccttgcgcaaacccgccgctgaagggaaaaccggtgaaattatgagtgctaaaagtgaactgccgtgtcatatcagcagtaccgccattcgcgcgatgagttatctgaatgacattaggaataaatgtgttattagcatacgcatgcccgttctcccgataggtgataacgtcttctccgcccataggattgcttaaattgttaatagcaatgaggccatttctaaacgtttgatagcgatatgtgtaggccggaagagtatttggattaggcggtaaaacatttctgtcgattgggatcgttgctcgagttaagtggccattcgtatgcgaaaaataagtacgagcgacccgattgttatctttcaaactgtcggaaatactgattcttccagtgttgtattctattgataatatttctctaccgctttcttcatttactatttttgacaggaaacccatgttgttatattggaatgaaatgtgctcgccattttcaaatattatttgcgctattttaaatgagtctgatggtcgcggtcggcgtaaaacatcaatcatgccgtctttataaataacatggagagtattagcatcatgtcttcttacggctatgtctttcagtttacgatctctgattctcatatatgaattgatgggaggcagtgcatcggtaaggaaactttcgccgcttaatagccttaagcgagatgtagtgctatcaaattcagtattactgattgaccaaccgagcccatagccggagtcggttgtgtccaacatagaaaagaaaatttttatatcacgactgttttctacagggccttcagggtaaatcgttgctaaacggataatactaccatattgaccagtacgctcatcgacatccgcactgaggtaagagctgaagttgaaggcattagaatatacttgcatattgatttcctttaaataatttttgcgatgtgatttatttaaatacaattaacaaagtatttttgtgacatgcttgagtgtatttaaacaagcgtgatgacattataattgaatggccgatggggctataggatataaaatgaaaaattaaattttaattacagtttagggttaattaatttcttcaataaaggaataaaaaagagaattgcgaacttcgccattttcttcctctatcaaagtcttgaattttttctgttgctgagaatttaaagaagataatttattatttgactgatggttatttttattgagatgcgacactgcctgagaacacattggcaaacacattacgctatcaataaccgcttcactgatattggggaatccgccggcaaaacgaaccagatgactaatgccaggattacgctcaacttttgaaggagtatgtatctctgggttgaaatagataaacatgtagccggggaatagcggttctataacttgcctggtctgccctggccgatcggctcgagaacgatatgtccgtaatattgggctaaaaaccatgatattcaaacgctctaaagctatttgcgcatgtagtagatttttttttccgggtttatgacaagtgagataccaacgttccattatttggccctctggcaagaggtttattaacgaaagatgcggtatgccgggccaagctccgccaaaatcgtacccaaaggatagaatttgacagttttatctatgacgaagctcaaattaatcgccactgcagactgcatctagactagatagcattcataaagtgcgaggtataactatcatgagaaatactttagtaaaagcaaattatttctacaacctagtaaacaaacttttacaaaagctatgaatgaatcggatttttctgcaataaaatagctaatttacactgcctatctcaccgtttaattctgtatatataactttagaatcatatgtatctccttgtttcggttactgctatagggtttgaagcctatgtgtgaaattatggctataatgaccatgatattatggtgctgacttagcaaacgcatctgttatattcaattttatgaaagtattctgtatggataatgttaagtctggcgataaatctcagagagtaagtaggcaataaaaatcgcgattataaaacactataaaatttatgtttttaacaaaaaatccgataggtatatttgtacaaaaattatatcgaaactaagaagaactccacttttccatttaaaataaatgatattttatgtttgaaggctatttcatctaaattattagccttataaaaaggcttgtgataaataacgatttaagttctattttgtgcgtaaaccccggcttcggcctcgcgtggtaatgatctgttcgtcgtaaaaacgcttcttcatgggcatgtcctcacgttactgaggaagacattactaacatcacggtgtattcatcgcggcgagcaggtcaaaatggtgtgcgcgtctgttgtgagcgaaaagccgatgttttacttggtaaaaatagcatggagtgtcgagattacccgttgcgactcaagagttgcggacatcgcagtgttcctaggaaaaacttcaagcagattctaaatcttatcgtttgcaacctgcggccaaattcatcaaattaagccagtacgccccttcaactcttaattatggaagatagacatgatgcataaaaccctttcctgtgcgctgctgctcgtcgcgtcaggttccgtgtttgcaacgcctcaaacagaaaagaaactgagtggaattgttaataacgttgttattcctttgatgaaggaacaggccattcctggcatggcggtggcggtgatctatcagggccaaccttactactttacttggggaatggctgatatcgcaggcaaacagcctgtcacgcagcagacgttattcgaactcggttccgtgagcaaaaccttcaccggcgtactgggtggagatgccattgcacgcggtgaaattaaactgagtgatccagtgagtcaatattggccagcgctttcagggaagcaatgggaaggaattagtttgctgaatttggcaacctataccgccggtggtttaccgcttcaagtacctgataacattaccgatgaggcgtcattacagaattactatgaaacctggcagccacagtgggaaccgggcacaaagcgtctttattcaaacgccagtattgggttgtttggcaaattggcggttaaaccttcaggtatgagctttgagcaggcgatgaataaacgcgtgttccagccattgaatctaacgcatacctggatacaggttccttcaacgtgaagaaaaacactatgcgtggggctatcgcgatgggaaagctgttcacgtttctccaggtatgttggacgctgaagcctacggcgtgaaatcttcaatagaggatatggcaagctgggtgcgcgccaacatagcgccgtctgaagtaaccgatgcctcgctacgaaaggggattttgcttgcccagtcgcggtacttgcaagtgggcgacatgtatcaggggctgggttgggaaatgctgaattggccgatgaaagcagcaatcgcggccggtgggagcgataataaagtcgcactcgcaccgctaagtgcgacagaaattaacccgcctgctcctgcattaaatgcctcatgggtacataaaactggttcaaccggcggatttggaagctacgtggctttcattcccgagaagaatcttggcatcgtgatgctggcgaataaaagttatcctaaccctgcgcgtgtcgaagccgcttaccgcatcctggaagctttacagtaaagtaaatagtatggcccgctttagcgggccttctcaaataacgggatacttctaaccctgttgcatcacgtctacttaggtggccagttttagtgtgccactccaaattgaatagacccgggtttcgtagacacttttttgcctcataatggaggctcaatgaaggagtgtttatgtcagccaaaaatttcactgaagaattcaaaattgaagccgtacaacagattagcgagcagggataccctgtttctgaggttgcggcacgactcggtgtttctaccaacagcctttacgcgtggattaagcgttaccaaaaacctgaaccacagcgaaagcaggacgatgcccttcagcacgaagtaaagcgcckcaggcaagaacttaagcgtgtgactgaagagcgagatattttaaaaaaggccgccgcgtactttgcaagaacgtcaggctgaagtacgccttcattaaacaaatgtcctccttttatgctgtacgccggttgtgtctggttcttggcctccattacagcggttattaccagtggctaaagcgacctcaatctttgcgtgccaggcaagatgagcgccaaacaggtcttattaagcagctgtggcttgaaagtggtacggtttatggttatcgaaaaatctggctcgatatgaaagacttgggtgaacgcgctgggcgtaacaggatcgcgcgcctaatgaggcttgcagagttggcttctcaaaccggataccggaaacgacgctattacggcggcggaaagccttcagttgccagccctaattaccttgagcgccagttcattgttcctaccccaaatactcattgggtgagtgacatgacctatataagaacgcatgagggttggttgtatctggccgttgttctcgatctcttctcgcgccgggttatcggctggagtatgggtggacgaatgacagcagagttggtgatggacgccttgttgatggcggtgtggcgacgcaaaccagcggcagaagtactaatccattcggatcagggttctcaatatacgagcgaaagatgtcagcactttatgacagctcacaatttaaaaagcagcatgagtcgtcgtgggaattgccatgataacgcggtggcagaaagttttttccagttgctgaaacgagaacgcataaagaaacggatctataaaaatagagaagaagcaaaggctgatatcttcgattatgtagagatgttttataatgctaaacgtcggcatagtgcctgtgaagatcaaccccctgcagtttatgaaagygcctggttcatgaggcacgctaccgtctaggaaactagggtctattcacctcaaaaacaataaagctttacgaggtgcctaacaaggtgcctaaaaggttcggatttaattagtttgcttcagactcagcgggacaaattgcaggcacaaaaaagcccgcagggcttgcgccgtgcgggctcttaggactttatcggatgactctggtaatcatcgattgaagattttgggctggcgtccctgtaactagatatctatttgattgaattttctagataactgttgtttctgactttacctttggttctataaaggaaccataaatcgtaacggcatgaacccctgaaaatagtccgttggcaaactgtatcaaaaaatatcaaacctcttggttcaacttcctgatgtcatctgaactcatttcattggtcttcctttaacatgtcgattacgttagctacatacattaagtcttccgcctgttggagattgttatgaaaaactggtcagttgagcatacgagagaagtgaagaagtggctggacatagatacatatcgcggattcgaagagcttccactcatgcagctttatcatgaactacttgcaagaaccttgttcttcaaaccttaccatgaagaatttgaagcgaaggccgtaagcctctacatcgacaggatcttcaatggaaatccctttctcatcacagaaaagcatttaggttatctcacaagagaggacacattgtatcagcccccgcacttttttctcacaaccaccgaacgactggcacaactcagcatcgttggactgcgaaattcattgttcttctgggatggaagcgatgagtattctgttaacagagaattcctcgatagccctgtatcggaagttttgccaaaattgttcagagatacggtcatggtcgaaattgacctagcaaacgggacagatgaagagatcgctgaatcactcaaagctgcacttcctcaatggcgtaaagtgcgtggtatagaaccagatgtaacggaagctattcgctttggttatggaacgattaagaaaatcatcaactacagacttataccccttattgatatcttggtatggtcaaacctgcaccaagttcgtgtatccgaagaccgcctttcccggctcctgtacacggatgatgatgatgaagaacaaacccgcctgaaccaccaaatcagggatacggacagaccccttgctctgaaggccgcgagtataccgttcatccgtcagtttcatctgttcatcaacaaaaacgaccacctaaaaaagatcagagtttcagacgtgatgaaaatcgctgattctgactaagaccaacctccattagctctggcgttctcggcttcggtctttttcctgctgattcatttatatagtaattcccatcgcaactgaaatgaggaataaaatatgaatcagcacaatactcgccttattcgtttaccagaggttctaaatcgaaccggttatggtaaagcgtggatctatcatctaatcagcaaaggctgtttcccatcaccagtcaaaattggatctcgtgcagttgctttcattgaaagtgaagtagacgaatggattcaattaactatcgaaaattcaagaaagcatgttgcctgaaataaattacagccttcttatttatgaagattaattctcaggtttgtaaagtttaaatctttaaaaaacctatatttaacgtaattctttacgtttttttaggcaggtcttacgccataggtatttaaaggtggtttcttaatatcgggtatggatacggataataatcttctttcataccagagaatagctcttttaacattaactttctttctttcttctaataatgaaagtattatatttttttctgcatttgaaatttcattcaacaatatagtgtcatcaatatcacattcaagtttaggtttgttttgttttactatgtattgacgccaatttgatggtaaatcaagtgtaagtcgagggattttactttcgttaaatactttattgtttttttctaagcatttatttttagcttctgtaagggaagtaaagatatctgatttatctgatccttctgtgtctatcactacataaacagtaataaagtcttttgggcatatacttaattcatttttgtttaaagaatcgaatgctttcttcgggacgggatagaataaataaggaacacatatcgatagtattttatatctgtgctgtgccataactcacctcgatcaacggaatgaaatctgattatagccaagttaaataaatagaacaacctttttaaaattgacaaaaaaatatattagattataaaaatataaaataataacaaatagaggtaaaaatatgttcaatgaattagattttaataaaatactaatatcttctgagcgtcgtatatatttcaatggattcgaacatgcctttttttcttacgatggtgtaaaacctatccctgaaaattttgataatatgtacttaattactaagatgaatttattaagagcacaagcaaaatcaaactttatatattatgaattatatgataataatgtaattcacactgaactatttcaaaataataaacttaataaaaatgatttatctattgatgtattcacagacaaatatataaaacgatttttacatgtaatagaaatgagtaatgatcttgacaataatgattgggaaccatatattaaatttttatcaaacatggaaataaaaaaatcattttatgcattacaatacaccatactttcaatgcctgttacttcgcatataccacaatatttggttgaaaagtacctgaataaattatctgaagaacgagatatgcataaaaacaacaacataaaatatttggaacaatatattttaaatctctttgatctaaaatatatatgcattcattgatagaatctccaatgaagtatttcataggtataccgatccttaggggaatcgatagatattcctgtatgtcgataagatgagctagacgaaaaagtactgctgcatcattcgcttatagcttatcttatgcttgcgttgataagaattgcccccatacttgtcctctcataagaagtaaggtgttcatacacacccccaacagctcatcatctctctaagttgctcaacgtattgaaagcgagtgcaggcttccctgacttcaatggtgccaacgctactgacccacgcttcttcgattaagtcagtacagaatcctttcgcattgtgattactgaagggatacatttcatactatgagccactaacaactctttgaaatccctgcgttttaacgtcatgttagcttcttagcttcttagcttcttagcttcttagcttcttagcttcttagctgtttgccgattcaagcggcatatgaaaatcagaaaacattattgattatcataggataagcagcatcttttttcggaatcgccattcagatgctaacatcctgtaacatattaattaaatggtgtatcctcatttctataggaaaaatccgctttaaagcggttgctgattgtgattattagttttgtggggcaatggcaatgtgcgaaagggtgttaaaaaaagatgtttattctgaatgggttatacgcaatagcctgtactggatgacttcgcttactcagtggaaactctgtgaagatatatcctcctggacaatctcttttgaaaacgatagtcccgaatgcctctatgagttcgagaggctgctgaatgattacactttgcgagaaaaactacagcataaaactggggcgttgagagattctattgtccataaagtgcttcgcagtgtcgatgaaaggctatcgtaatggaattgatgccattcaattttgacagattgcctaatggacaggtgtttataagcaacctcgctggttttcatcacttcattaatgagcaagagctgcttgatctttctaatgagcaaatcaatgcggagcaatcaaacgcactagaaagcaagctgttcataaccaacgaaagctcatcaggtatcgctccctatgctttaagttctgcttttgcaaaacgattgatgaatgaactggcgatcaggccaattttcatgattgtgcccacattacgttgcgaccatacctgcaagtattgtcaggtcagtagagcttcagtgaacgcctctggttatgatttagatcccgctctcatccccgatatcatttctactatcaaaaaactatcaactccaccttacaagatagagatacagggtggagagccactcttgcggttcgatttaattcagtctatctatgagcaatgtgctgaaacgctgggaagcaccgattttgagatggtggtagcttcaagcctgtctgtcttgaatgaggatatgcttgaatggtcgagagacaggaacataacgttctctgtttcgcttgatggtgaggaagttgttcacaacagtaatcgaattcttggtcatgggcttgcgtacagtagaacagtgtcaggggtagaggctatcaaacagtctttaggcgctggtcgcgttgcaacggttactacagttactaaagatctcattaggcatcctgaatcgattgtccaggctcacttgtctcttggcctcaaggacatgtttatccgacctgtaagtccctatgggtttgcacaaaaagcatcgttcacattttctatgaaggaatacttcagtttctatgcctcgttgatagatgaaattcttaagatcaacaaagaagggataagggttgttgaacattcggcctccattcatctgaaaaggatcttcaatcccggttttagtggttatgcggatttaaagtcgccaagcggggtcgtgcttaacagtattcttttcaattatgacggtcgagtatatggtagcgatgagagtcgtatgttgcagaaggtgaaccctgaaacggagttcagtgcgggtgaggttaaaacgctatcattttctaagagtccttactataacgcagtgttgagttcatcgttcaattttgctctgccgggctgtgatacatgtgcatatcaaccattttgcggtgcagatccatgccagaacataagtgtacagggtgagcctgtcggtgataggagtcgttcaacgttttgtcagtatcacaaggggatgttcaggtatctgatgaactgcatctcagaaggtggtcagaaggctgagatgctaaaaggatgggcatatgtctgaggttattaggaacgatatctttcattttgcttcaaaaaagaatgtgcccacggggttctatcggttatgcaaacaaaaaccaatgaaccctttattctttttacccaatttactggtagttgctgaaggcaataatgatgccattcaaccatgctttgatttctctgttattagcactgaattatatgagtcaattgaagatggagatattgggataatcaacaatggcaatatgatacgcgtaattctgtcccgcagagccaatcataatactgtcttagtaacggaacgctgcaataacttgtgtctgttttgttcgcagccacctaagaaatcaaatgatgactggctacttacccaatcagctcttgctatagcttcatttggtttggatggagttgttggggtcagcggtggagaacctttgctgtatggagatgatttccttcacttcattgattttatcatcgagaattcaccagatactgctttgcatgttttaacaaacggacgcaaattttctgatatcaactttactcaggaaatggcaaagcgaagcaaaaagatcaaaatcacctttggtatcccgctctactcatcaagaccacttgtgcatgatcatctggtagggaatgatggcgcatttaatgaaacggttaaggggttaattaatgcaggaaactcagggattaatatcgaacttagagttattccgacactggctaactatacagaattggatgatattgtagagttcgttggccgtgtgttctccaacatcaatcagatttcccttatggggctggaatctatcggttgggcacgaaagaactggtcaacaatcttcattgagcacagcagttatagtgagaaaataatctccgccatagacgctgcgcacaggtcaggtatacctctaacaatttttaattatcctttgtgtcatcttcccgaaagagcttgggagcttgctgctcagtcgatctctgattggaaaaattactatcctaaagaatgtgatgaatgcactcagaagtcttcctgtactggttatttcagttcctcaacaggccgttttcatcaaccaccgagaccaattttatgaaaaaatttaattttgctgctctacttccgggatttttggcgctcaataattctgtatgggcaagtgattcatccaccggagcaagtgatttgcctggtatgactcttaatgaacatgatttagtgatagccccacttaacaccgaagttccattctacattgcagggcatcgcagtcatagctcccatcgaagccatagttctcaccgatcatcatcaggtggcgggtactatggtggcagcactccttattatccaaaaacatacagctcaccaagctcatctgggtcttcaagttcaggaacaagttcctcatcgtcctcttcctctgtgcgttcgcttcgttctaacgacaataacaactctactactacgaattctgttggaactacagaagctaaccgtgcaagtaatgggctgacttctggtacagagaagcgtaagcgcttaatcatgcgggttcaattcgctttgctggacaaaggttattacaacgggaatattgacggcataatggggccttcgacaaggcagtcaataaaaaattatcgcattgcgaacggactaccagtaccctcaagtgaaaccttggatacacagttgttaaattcattgagtattttagctcgataaattaagtatatttaaaattgttcactttaacattaacttgtatgaatatatatttcagaggcgattaaatgtcagtcagttataacatatatagaatgccatataagagtcttccagaattgacaaaaaaaatcattaaagaagggcttgtcgaacaaaaaactattctacatcaatcttatcaactcaaattttatttttctgataagttaaaaggaaatgaagtatggtggtgggatgtatttagtgatttctttaatgaagaaattgaaaagcctcataatatattctattttggcctgctaataggatttaaagaaaaggaccctgagaattgctatcttatcagtcttggtaaatcacatttttatctcagcaagtttattgaagcagactttgggctgaatgtggcaatgcgtatagctaatgatgaaaatattttgctcaagaaaagtagattcttttgtgggggaaagagtcaggaggcatcgtcatattcaaagtttgtgcaaggatcatattttcctggcgaatccatcgaacatcttaaaacaaaagccaaagaaactgacaagtggggatgtaataatataactttttctgattcaatacagctaagtttagatggtgcccctactgcattagtagatgtcttcaatgatattgattcttcgttggcaaccaaagagaaaatcgaatttcctaaatcggaaaaaatcactgacgagtcaaagatagatgagcttgataattatctacttcaatcgatcattaaagatgatgtaaatgttattatagatgagattcaatcttttggtgcctctattgtaattaataattctttgacattttttaaattgcacacaaaagttgaggggagtggaaagtatcttcaatcagcagataaggttaacgatataaaaataacagatgttaagcaatttataaaaaacaacgacataaaggatatcaataaagtttttgttaagataactaatgaaaataacagtggtcatacggcctcgctaaaagaaatattgagtattacttatagcgatggcagtgagcactacttccttaagaagggagggtggagtcgatttaactctgcctttatgaagtatttgtctacctctttagccagtataaaatttgaggttaaagatgctctaaaggaagacgaattcaaagcatggcaagctgaaaaaataaaacaaatcgaagaaggaacttctaaagacaaattagaatatagagagtactattttaatgaaaagatgtctgttgagaaaggttatatacttctagatcgccagctcaaaaaaataccatccttacgtgatgatggaaaggactacaatgttgaagttgcagatctttataaaaatggagagattattgctgtaaagatatcagataaaccgcatgatctaatttataatattgagcagtcaaaaactacaattcaaactatagtaagaggagtagtaaaatttgaagagaaaattactgatgtggttttatggatctcaactactacaaaagccaaaaaattgattgacatcaattctattcaatttttattagcggttcaaacttggaaggaagttgttgaaggatttaatttgaaaccaaagatatattattcgcatcacgaaaaacccaaaaagaaaaaggaaaagaaaaagccaaaaaacggttgattaaaaatattgaatttccttatcgaataatttcaggagagaaaagaacattctaattatcacattataaatattatttgagtgtattgatggatttaaaatcttatgtggtggtgttatgtgaaacttacaccaccattgtttattgaacatttttaagaactttcaaaatttactctggatgttggttataaaccccttagctgataagctgtggcactatttatgcaatcatagtgccctcataatctctgtacaattttatttgaaatgaattaaaccataattgcctcttaattcattatcaacaagagtaaagttcgtcatttctctgtcaagccaataagactcttcaatatgctctaacagtattatttggaaaccaccatgagaccgcattttctcaacaaaagaattaatttcatttagggctgcatcaagacttgcaaagtcatcagtttttttaccagcagtactaaaatatggagtgctgggctggtcaatgactaagaatcgtggaacccacggtacttttctatctcttaccaattcgtgaagtgcaaggaaataagctacatgtacatacatatagttagaagcacttccaatatctatcattttttcaacttgatttttatttatcaaatcaagtgttttttttgccttgttgaatatcggagttgcatcctcaaatccttttaaaggcatccgtttgaatatttcctttattttttcgttcagtaaactcaatgtatattctttaaaggcattattatctgttatcttgctttctaactcattaattttagtagttatcttttctatagtatcagtataatcatatttagggagaacaactatccgtttaatttcagagctgagttcacccatgaaccgataaagctcgattggtgtgattttttcatcactaacagttgcaagttttttactcaaggatgatattttaagttctaactcttttctcttagcatttgtttttgatatgagtgagttttgtcctttttcggctatagccttttttatctctgagctttggttcaataaggatttaatgattgaatagatgttttttgtatataatatttcgctataattatcatctaaatatttagctattaaaagagagtcttggttgtcttttaaaaacttcttatattcagtatttgtttctatatattcattaatgtctgtcagttctttttttaagaggaaaagttctttttcaatttttgttctttcattaattgctgggatttcgtttatattcttgtaattaactatcgctttcaaattttcaagtttatcacttacagttggttcattcttgctgtttccacttattaaaccaaaataatacgccctgtcgtatagtgattctatttcactttcgaaattgaaataagagtctttgctagccgactgtttatattcgatgcgagcaagattcctttgtaattcttctaaccgcgttctcattatcatagtttcggcgttttcactgccaagagccatgtcaaaggttcggtcaatacgctctcttgtctttaaatcagagattttcgaataaagatgttctgaagaggttagtgttgtttgatctataaagcaatgcgggataaaatatctataggatacttttgacccttgttgtatgaatctaccaccataagggatttttagagaactattaataccaaactcataattcagatgttcttttaaaacatcctttttgatattgttaatagggatttgtggaatgtctccatttttgtcaaagtaaactagatcatcttcttcaaagtgtgtcgcttttctacaaatagtgaaatatttaccgtttatacttaatctaatcccataccaatttacaaaattatcgacatttgtttttgatataccatcagatgatgaggataaaaggcaataatcaatgatagccagtatggaggatttccctttgccagaatcacctgttattacatttaccttattttcctcaagttctaaattcctcaaggttgaatcaatttgccatattaaaatattagtaatctgcattataatctaactccacaaatgtcatatatattgtgtggttcttctaataataaacgtgcaacatttatagatgctgcctgtatttttacggctcttttgccaataaacgggatcgcattatctaatattaacttgtttttaaatgctaatttgccgtgttctaattcagctattccattttcaaggcacaatgaaacacaattaactgaggatggaaggaaattatagaatcttttatttatggatactattatttcgggcttggttaatagtagatcttgaaaagatagtgtattggttctcttgtgggcaaggtaatctaagctttttttatgaaatataattggtaaaattagcattgcattgcttatttcaatatttgatgctattgataacacctcttgcaaagagaatatacccaaaagctcattgttatatattttcatttatagactgactcccagttttgaagccatcctattttgggcttatctgaaaggagcaagaacgttcctgtagtcatagatttaggtaattgatttttatccaacacaatattacagtttcctgtcaattcagtatagacagagaaggctttattaagatgatcttcatttatttctgtaaaacggcttcgtatatacgttgctgaatgacgtgattgccattcatcaagcgcttttagatatattagtctttcttcttgagttgttaaatctccagagctttgcaatttttgaatgaaagcttctgttttggccatttcatttatatattttacgattgaatcgctattcaaatccaaatctttgagttgtttgtaagatatctttgattcaacgttagttgggtatgcagattcaaaatcgtagtattggtcgaaattatttatacaatttcttgaaatttgaataatcctatctattcccaaattatttcgaaaatcatcataacttatatttattttggtgtgatttttaaccaaatcatatttgtgtttaaaaaaagcacctgaaatataattaaaagcatcatctattttatcatcagggattgctaatgtttttagtaatgtttttatttggcggatgatcccatcttcgctatgttgaaaacttatactattaaataaacgtttagaagaattgctatcgagtgagtttatgatagaaatatacttatagaggtcatctgacttatttttatgatcttgttctatcttttctatttcatcttttattttttcaatgtccttagtgtcgttagtcaaaagttgcacgataccaggctctaaggtaagacctttgttagtgtaaaaaataaggctaatgcttttgtcgcctatggtcttaatcgcctctgaccaattatataatgtttttcataagtctatgtctttattagttatattagacttgttaattgaatgtttaacttgaaccaaagttttatgaccctcgatgctctcaagatggagatcgtcataaacttcaatcccaatgtgttcttctggtttaagctctaaggcatgttttaaagcaacgtaatcttgataggtaaaacctattgaatttttgtcagcattagttttttcaaagaaatccatatggtagcccactaaggaaacaagcaatgaaagcataaaaaaacatcagtatctttttttcaccatatcaaacactaaaaacatatggaagcatacgtatcaaagtttagttatataaccttatgtttttatactggttttatgtacatgtgcgctttcaatccgatgagaatgttttagctaaggggcattcgtcagcatatgggctttccaggctatccctatccttcttgctaatcccctgtatcagtcaagcagcgatagctttagctctttgagtttgaacgtaatcactccaccattgcatcaaactctgtcgctctatcagatattctgcacgattgtatgctgcgataatttcatcttttttttgagtgggcaagcgctgcctcaagaacttcagatctgaacttaccggattcttctgccgctgttcttgcaatagaacgcataccgtgagctacaagctcacctccaaatcccattcggatgatagctgcattggcggtttgttcatgcatatgattaagcggcgctttaatgctggggaaaacccattctctatgcccacttattggtttcattaattcaagaatgcgcaaagcttctttactcaaaggaactttgtgaggttttttcattttcatgaaatcagcaggaatgttccaaatactgttggttgtatcaatatcagaccaccttgcgcgaacggcttcacccggacgaacccatgtcaacaattgccattcaattagcatacgtgtttccaaccggattgacgcattcgtcaaagattccataaaccttggcaattcgcttgggggaagggcaggcatattttgctttttgggtttactgaatctttggccaaggttgtcagccgggttgaactcaataagttcttcagtggctgcccaacggaagatttcattcagacgggaaatgatgcggcgtagagtttccaatacgcctcgatgctcaataggatcaaggtgttgttttaagagcttaggtcggatctcattgatagggatattacccagaccaggaaagacatttctctctaagctgcgccagatgtctgctgcatggtcttgtgagatacctgaggtctttaccttctcatctaaccatttccgcgctacggcttggagagtgtgctcagtagcactctttaatgccttcgccttattgttgttatggacttggggatcaacaccatttgccagaaaggagagatattcgtctcgtaaggctctggcccttgcaagggtaaggtgaggatatgtcccaaggctcattttggttcttttcttgctcactggtactgcatacctgaaataccaatttttcttgcctccttttgccaaaggagcgattcgtagaatcaaaccatcgccgtcaaataagttgatttctttatcggctggcttagtgcttttgatttcagtgtcagtgagcttcttagcgatttttgccatttgggaccctcgatttttggacccttcttagtgggtcccattcagggtgccataactcgtagttctcagcaattctcactggacgacaatagacgtaaaaaagcccgcagagcttgtgctgtgcgggcttagtagacttcattgtacttcaaacaactaaaaagtggtggagctggggggatttgaacccccgtccgaaattactacgccgtcggcactacatgcttagtccagtcattacattcgccggttagctgcggacggacacgccactaacaaactatcctgattgggtttaacgctttcaccccaggcaaggtgtccacgcgatctcttttgggtttgacctctcttgatccccgtcctaagagcggaggctagggagagagggaatcttcagtttcttaggctgattaagctgctaaagcagcagattcgtattgcgagtcgtttgcaattattttttttgcggttttttacgaggcctccgcacctcggcatgcaccttgggtttcgcgaatcccgtcgaatccagaatcagccccaaagaacttctgtagtataccagaactataacctgttaagccagagacttaacgattagagtgtttcataattctggctttatcaacctgccattcgcgatctttaatatcatcacgcttgtcatggtctttcttgccttttgcgacgccgattttaactttaacccaggcatttttccaatagacggaaagagccactacggtaaaaccgtcgcgattaactttgccgaccagtgagtcaagctcacgtttattcagcagtagtttacgggtacgcataggttcgcaaacaacgtgtgtagacgcgacgtttagtggggtaatggtggccccaaacaggaaggcctcaccgtttctaaacgtgacgtagctatcgctgatgttggctttaccagcgcgcagagattttacttcccaaccttgcagcgataggccagcttcgaattcttgttcgatgaagtattcgtggcgggcgcgcttattttgcgcaatggttgcggaaccgggtttgtatgcttttttctttgtcatagtgttgatcattatactgtatgcgttgacgaatgaaatcctttcccgtgcgctgcggccttattttgtcgattttattaccgtttatgcgccgttgattttttgtcagttgccagataaatggtattatccgtgcgttttatgtctctcaggaaatgttatgccacagattagtcgctctgcattagtgccattcagtgcagaacaaatgtaccaactggttaatgatgtttgctcttacccagagttcttgcctggctgcacggggagccgggtgcttgacgcttgcgataatgaaatgacggcggcggtagatgttgccaaagcgggtatcagcaagacgtttaccacgcgtaatacgctaacggataaccaaagtatcaacatgcagttggttgacggacctttccgtaagctgatgggcggttggcatttcacgccattaagccctgatgcctgtaaagtggagctgcatctggattttgaatttactaacaagctgattgaattggcttttggcaaagtgtttaaagagctagcggggaatatggtgcaagcattcacccagcgtgcaaaagaggtctacagtgcctgatctttacgttgaggtcgtttatgccttgccagagcgtcagtatgttcggaaggtgagcctcgcggaaggcagcacggttgagcaagcgattgaggcctcggggcttttagcgttgcgtactgatattgatctgcaaaaaaacaaagtggggatttacagtcgccccgtaaaattgggtgacagagttaatgatggcgatagagtcgaaatttatcgtccgttaattgctgatcccaaagagttacgtcgaatccgcgctgaaaaagcaaaaaaataaggcgcgttgtgcgcctcactttttatcagccctgaagcatgacggataaagccagtctgattgaagatcagcgccaatggcatttatccgttagcgctatatcgaaggtgattctctatcttccttctctaccactagcatgatcgacgaaaaaattaatttccgctcagcgctggttcatttttaatatcagtcagaacaccgctgctgttgaacgtcagggtcagcgtctgctgtgtagccttttcgtgtcccggctgctggcggaatacgtagaaccaggtttgagttccaaacgggtcctgcagcatcggagtacctagtgtgtatgccacctgttgctgcgtcatacctttatgaattttggatacatcgttaggtgacaggtagttaccctgattaatatcaggccgatagaccaccttttccagcgtggaacaacccgcggtaagcatcattagcattacagcggcggcagtcagcattttacagcgcatagtaatcacattcctttagggcataggatgacgatgataatagaccttgcagcagttggaaacctttacaaggcttcaatatgacctcctgaatgcaaaaaagttgagcttttttatgcagcaagcagctctttcgcgtttgccagggtatttttcgtcacttcgctaccgcctaacaggcgcgctaattcttgcaaacgggcttttttatccagcttatgcatctgtgtttcggtttctgcgccatccgtttgtttactgacaaagaagtgttgatggccacaacctgcaacctgcggaagatgggtcacacacatgacctgagtggattcccccaactgacgcaacagttgaccgacaatcgccgccgttggcccgctgataccgacatctacttcatcgaaaatgagtgctggcgtatccattttgcgagcagtaataacctgaatagctaatgcgatacgcgataactcgccaccggaggcaactttagccaaaggttgcaaaggttgccctggatttgtggtcacactaaattctatacggcttgccccttctgcgctgaggtgttccggctcgaaatgcacaccaatggcaaatcggccatgcggcatagagagctggtgcatgctttcggtaatcaaggtggccagctcttctgcataatgctgacgagcctgatgtagctgatttgccaatgccaatgcgcgctgatagtgaagattgaccgtttcgcttaactgttcctgatcgctttcctgttgcgaaaggagttgttgttcatccagtagctgttgatgaagctgaggaagttcttccggcgcaatgtggtgcttccgagccagattaagctggcgtgatagtcgctgttccagttcatataggcgattcggatccatatccaacttttcaccataatggcgcaattcatcgctagcttcgctaatctggatcgatgcttcttccagcatattcaataaattgttgaactgctcatccatgcctgccagttcggtaatatgctgtttggcggtataaagctggctgagaatattttgttgttcatcatcagaaagcaactgtagagcctgctggctgatagaaatcaactgaccgctgttagccagacgcttgtattcggcatcgatctgctcatattcgccctgcaccggtgcgaaggcattcagctctttaagatgatattgcagcagttgatgacgagcatcacgctcaagggattgcttctgatgcaaggccagcgaacggcagctctgatgccacagttggtaggcggttttcatttcagctagcaatgccggttgatcggcataggcatccagtagctgtttctggtgatctgatttcaataacagctggtgagcatgttggccatgaatttgaatcaggagttgccccagctctcttagttgagaaagaggaaccgcagtgccgttgataaagccccgcgaacggccatcgaccccaatagcgcgacgcagcagacattcattgctgtcatccaactggtgatgttcaagccatgcgcgagcagttggggtgtctgctaatgagaaacgagcgcagatgtcggctctggaagcgcctagacgcaccatgctgccatctgcacggctacccaagcataatcctaatgcatcaatagcaatagatttgcctgcgccggtttcgccagtaattgcggttaatccgggctgaaaatcaatttctaactcgcgcacaatagcaaaattactgatggtcagttgggccagcatggtaaatctcctgtacataaacacatgtctgtatttgaatacagtataaactggttttatatacagtaaagtggcaaaataactttttagaataatttttttgaccaacccaacttggtgcttaaggtattgaaatagctgtagtcctttggatgaatcaaattcaggtggaaatcgctgcgtcgaaccaggacttcttcaccttcctgaatgggtagggcgatctggctgtcacagctcacttccagatcgctgctaatcttggagaatttcaatcgaatggtgctgctgctgttgataaccaagggtcgcgcggaaagcgtgtgtggaaacatgggcactaaaactatggcgtccagcgtcggcgtcaatatcgggccgccggcggagagtgagtaagccgtagaacccgtcggagtggcaataatcaggccgtcggatcgttgggaaaacgcaaaacgatcgtcgatatacacttcgaattcgatcatatgcgcgacttttccggggtgtagtaccacctcgttgatcgcggtgctcattctgcattgttgattggctcgccgaacctgagtttccagcaaaaatcgctgttcgctgagatattcgccttccagaacgtcagaaagttgctgttgcgcgttatccgggtctagatcagttaaaaatcccagatttcctctgttgacgccaatcactttgatatcatatcgagctaagacgcgcgctgcgcccaacatgttgccatcgccgccgaccaccaccgccagatcggctttttgaccaatttcagccagactgccggtaacggcgttggttaaattgaggtcgcgggcaatttgccgttcaaccataacggcataacccttggattttagccaatggtagagcatttcgtgtgtagcaagagcggccgggtgacgtgggtgaccgacaataccaatacagttgaatcttttattcattgccgtggttttcctcagtagagcctgtttgtgccctacattgtgaccggttcccttgaatccccggttttgatccccataataagccaagtagcgagattaatgctaaaacgcggagatatccatgagtagtaaagaacagaaaacgcctaacgagcaagtctcggaagaaatggaacaagcagtcgagcagcaagcgggagccgcacaagagactagtgacggtgttgatccgcgggttgcagagctggaaacccaattggctgacgccttgcagcgtgagcgcgaaagcctgttacgcgcgaaagctgaagttgagaatatccgtcgccgtaccgaattggatattgaaaaagcgcataaatttgcgttagagaaattttcatcatccttactcccggtgattgataatctggaacgtgctctggaatcagcagatcgctccaataccgaattgacatcaatgatcgaaggtatcgaattgacgctgaaatccttactggatgcagtgggcaaatacggtatcgaagttgtgggtgaaaccaatgtgcctttcaacccggaagttcatcaggcgatgactatgcttgagtctgccgatcatgagccgaaccaagtgatgatggtgatgcaaaagggttatacgctgaatggccgtctgttgcgcccggcgatggttgcggtttccaaagcgaaagcttaaggctacccaatcaagcaaaaggcaccttaacggtgccttttttacgagttcaatcaggtagttggaaatttaggttgccagtcgataggcgctaaattctgttttatcaatagttgattggcctgtgagaagtgtttacagccaaaaaagccgcgatgggcggagagtggggaaggatgcggggctttcaaaatatgatggcgctgcgggtcgataatttgcccttttttctgcgcgtgagccccccaaagtaaaaatacaattccttcccgatgctggtttaatgcggcaatcacccgatctgtaaaagtttcccagccaaaattggcgtgtgaatgcgctttgccaccttcgacggtgagaacggtgtttagcagcaatacgccctgttccgcccagctttgtaaaaaaccgtgattggggcgttcaaagccgggaatatcggtagccagctctttatacatatttaccagcgacggtggcgccggtacgccgggcagcaccgagaaggacaaaccatgggcctgatttgggccgtggtacggatcctggccgagaatcacgacttttacctgatccagttcggttaaccgaaaggcattaaatacgtctttttgcggtggatagacgattttccccgcgtgacgttcggcggcgacctgagccagcgtattttggaagtagggttgttgcttttcctgaccaattacgtcgtgccaagtgagggaggtggtcatgagactctcctttgtttttgctgaaaatttatgttgctcagcttaccggttagcgttgagcagggaaactgttaaaagtttacggtgtagatgtcgcttaaaatagcgccaattaatgtaatttttgttgaaaatttacaaaaataattgttgcgttggtatttgataaaattgatataaaacataaatttgcccacagctcgtaaagtgctgggctgtaaatcttgatttaagtcaaagaataacggtgatttgactggtatataaaacaataagagaacaatggttttaccaaataaccaacgtcacttttccattcctggaattttagccgtattacggaggcaccaaatgattactggtattcaaattactaaagctaacaatgaagccttgctgaactctttttggctgttagacgacgagaaaaacgaactgcgctgcgtatgcgctaaagctgactatgcagaagatcaaatcgttcctgctagcgaattaggtcagattgaataccgcgaagttccgctggaagttcagcctaccgttcgtgtagaaggcggtcagcacctgaatgttaacgttctgcgccgtgaaactctggaagatgctgttaaacatccagaaaaatacccgcagctgaccattcgtgtttctggctatgcggtacgtttcaacgcactgactccagagcagcaacgcgatgttattactcgtactttcactgaaagcctgtaatttatagggttttagccgtgagagtttaatgaaaagggagctttggctcccttttttattgtgcgccgtcttttctaaggtaaagcctgagcggcttcacacttttcggtattcaataagtcattcttatcttttctcataaagaactcatccgacctgccgatagccaagttacacccgttaggtgttcgcttaattttgctgtcgacaaggagtcgtaatgactatgccactgagtctttccgtagcttcgccgttaaatactctgtctaatccaattattccatcgaattcggtcagaacggcgagcacttcaactgaaactgagtcaactttttctgccgttgtgacagccaaaaatgcggtgttttctgctgcaacacgggaaagtaacgatctctatcaatcaatggtttccgatcttggtttatcccggagcgagcagtctgcggcgctaaaatcagctgaagtgataggaaagggtaaagcatctcagaaaagcgattactcgctggcgctgttggctaaagatgtttataggccaaccggggctaatctggacggattccagcgtttaagtgatgctgatctgcttaaagcgggtatcgatcctgctagtttgtctgaccgcgcctctggttttcaggctggaatctattcgaatcagcagcagtatgttctggcttttgccggcaccaatgatatgcgagattggctgagcaacgttcgacaggccactggctatgacgatgttcaatataatcaggctgttgccttaggtaaaaccgcgaaaatggcctttggcgaagccttggtgattaccggtcactcgctgggcggtggattggcggcaacggcggcattagcgacggcgaccgttgcggtaacctttaacgcggctggcgtatcggatcacacgctaaatcgtttagggatcaatccggctcaggcaaaaagtgaagctgaaagtggagctattcgccgttatagcgaacaatatgacatgctcactgacacgcaggaatcgacgtctataattccgaatgccattggccataaaatcacgctggcgaataacgacaagctaagtggtctggacgattggttgccgcataaacatctttcacgcagtctggctgctcatagaattgataaagttctgtcttccatgagcgagcaaaaaccctgggagttgaaaaatgcctgatagaacaccgatgaacagttgcctgcggtatattcgctacactgtttgcggtgtattgatatcgcttatgagttttgagggattggcgatgactgagagtaaaaatgtatttaacgatccacaagtaacgccgattgccgaagctatttatcgtggtgatgtcgcgcagatacagcagctcgcttctgaaaaaatcttgcagcagcggggggatcaatcgatcactttgctgcaatgggcgatcttgaatcagcagccggaaagcctggctgcgttactggaacttcatgccgatccgttccagcccggcttgcaaggcaacagtgccttacatactgcggcgagcgttaaggatgctcattatttacaaatattgttagatggtcggttgaaaccgaatgcgcgcaatagtattacgtcggcaactccgttggctgcggcggtgatggctgggcgagaagtgcaggtgatgatgttattggctgcgggtgccgatcctaacctgccggatcgcctgggagacacaccgctgcatttggctggtaaaatcaatgcgccagaattggcgctacgtttgttacaggccggcgcgaatgctgagttgcgtaataagcagggggctcattttcagcagtattttgcaatgacgccgcaaaaactacaaaccaatgaaatgcagaggaaataccagcagttgaatgaatggctacgggcaaataaacaggctgaattataccagaaacagccttgagactgcgccgcagcgatagagcaacggccgtgtgttaagtgcctgttttgtagataaacagtgtggatttaatttgctcgattttggacggaaattggggatcttgatgaaattatccttcagcaagacaaaatccgtggatgagtttacccataaaaaaagccgctttaacaagcggctttttgctgtccagtggaataaacctgcgcgttaagcgtcagctttattctttggtttacggcgcttaccgacatttttagcatcgcggtggcgcactttaaccttggttttttctttgttggccgccttcagctctttacgcttcgctaaaacctttttcgacggtttgccggtagatttggcgcttggctctttactggttggacgcaactcgtcaatgacccgaggtttcagtggttctttcagataacgaccaattctgcccagcaataaatgatcatgtgcttcaaccaaagaaatcgccacgcctttgcgaccagcccgaccggtacggccaatgcggtgcagatagacgtccgctgtgagcggtaggtcaaagttaaatacatgactgatatcgtcgatatccaggccacgagacgccacgtccgttgctaccaatacgttgacgcgaccatcgcttaaacgaataaccgcttcggtacgcttggcctgaaccatttcaccttcgaggaaccaggcgttaataccggcttcacgtagccagctcaccaattggtgcaccttttcacgggtacgcacgaagataatggatttctgcacgtccggctgtttcagtaaatgaaccaacagggcagttttgtgttcgatattgtctgcgcgatagtaccattgctggatttttttacgctcgcggcgagacggatcggcttccaactctactggctcttcgagaatacgctcggcaaactcgcgaatcgcttcgccttccagcgtggctgagaacagtaatgtctgcttacgccagcgagtttccgcggcgatagtttcgatatcctgcgcaaagcccatgtccagcatacgatcggcttcatccagaatcagggtttctaccgcacggcagtcaaagttctcttctttgatgtactgcagtaaacggccagtggtcgcaaccacgatgtcctggttctcgctgaagacttcagcatggttcatgtaggccacgccaccggtgatggtcgcgatgtctaactgagtgtgtttggccagttctcgggcctgatcggcaacttgcatcgccagctcacgggttggcgtcagaatcaggatgcgcggtggcccggattttttgcgtggaaaatccagcagatgctgcaaggctggcagcaaaaaggcggcagttttgcccgtacctgtgggagccgaacccaatacgtcgcgtccgtccatagctggcggaatagccgcagcctgaatggcggtagggcgctcatagcctttgtcgcgcagggcgtcaatgaggcgttcgtcgagatcgagttcggaaaaattggttacagtcatggtcttcctctacttggggcgccgattatagacgggttagccgaattcttcacctgtttaagcgggaatgatgtcttttaccttcaatcatattgtcctatgctacgccagttaaagattctggtgattaatgtgagcgaacaattgaaaataaaaccgagtttacgtcgcggtggttttacctttaaacagttttttgtggctcacgatcgctgcgccatgaaggtaggcactgacggagtattactcggcgcatgggtaccgttacaacaggctcggcgcgtgctggatatcggctgtggtagtgggttgattgctttgatgatcgctcagagatcgtcttcggaagttttgatcgacggcgtcgaactggaaagcgaggcggcggagcaggctactgaaaacgcgcaggcttctccttggcacgatcgaattcgtatttatagtgccgatgtaaatgcattcgcagaacaccatcctcatcaatatgatctaatcgtcagtaatccgccttacttttctccggcggtggcctgccgtgatgaagcgagaaatactgcgcgttataccggatccctgactcacgaagcgttgttgcgtagcgctgaacgattgatcacgccggaaggtcgcttctgcgtagtattaccgcacagcattggtgaggatttggcagcgtcggccgttcagcaaggttggtttgtgcggcaacaggttgatgtgcgagacagacccggtaagccattgcaccgaatgttgctggttttatctcgtcaggatggagaaaagctacatcagcatttaactttgcgtcaggcggaggatgtgtattcacctgaattttgtcagttaattggtgatttttatcttaactattagttgtgaaatattcattgtgacaaatagataaagaaactaagggcactgaagtgcccttaacagaataccgaaatatcagggttgaaggatggtcgggcgcggattttccagtagatctggataatcgagcgtataatgcaggccgcgactttctttcctttccatcgcacagcgcacgataagttcggcgacttgcaccagattacgcaattccaacaggttgttggaaatacggaaattcgcgtaatattcgtcgatttcctgctgcaaagtattgatgcggcgcagggcgcgttccaaccttttggtcgtacgtacgatgccgacgtaatcccacataaatagccttaattcatgccaattatgttgtattactacgcgttcatcggagttatcaactcggctttcatcccactcaggcagatgtttggctaatttggcgtggggtaaacgcatcaaaatatcctcagatgccgaccagccgtaaaccagacattccaacaatgagttagacgccatgcggttcgctccatgcagcccggtgtaactcacttccccaatggcgtacagcccgtccaaatcggttcgaccatgctgatcgaccatcacgccgccgcaggtataatgcgctgccggaacgatgggaatagcttccttggtcaggtcgatgcccaaagacagcagtttttggtagatcatggggaaatgctgcatcacgaattcagttggtttatggctgatatccagatacatacaatcggcacccagccgcttcatttcatggtcaatggctcgggcgacgatatctcgcggtgccagttcgcctcgcgcgtcaaaatcaggcataaagcgggtgccgtcagggcgttttaggtaggctccttcaccgcgcagcgcttcggttaacaggaagttgcgcgcctgtgggtggaacaggcaggtcgggtgaaactggttaaattccagattggcgacgcggcaaccggcacgccaggccatagcgataccatcaccggaggaaatatctggattggtcgtatattgataaaccttagctgcgccgccggtagccaacaccacggctttagcgcgataagtttccactttttccagctcgcggttccagacataagcacccacgacccgcttggttcccggcaggccaattttattcgatgtgatcaagtccacggcattgcggcgctctttcactgaaatattggggtgggtgcttgctttacctaccagggtagtctctacttctttacctgtagcatcggctgtatgcagaatgcgtcggtggctgtgaccgccttcacgggttagatgaaaacgttcttcgccgctggcgttggtttcggtatcaaagagtacgccctgatcgataagccattgcacgcagctgcgtgcgttactggcaataaattcgacggcatctttatcgcacagcccggccccggcaatcagcgtgtcatcaacatgtgagctgatactgtcggtttcgtcaaaaacggctgcaattccgccttgagcataaaaggttgcgccttcgttcagcgggcctttgctcagaacggtaactttacagtgtggtgcaaggcgcagcgccagtgacaggcccgcagcgccgcttccgatgatcaatacatcgctaacatgttctgatgatgatgacataacgtatgatgtgtgcagaagaagggtgattttcatggtagcctatctgcccgagcaaaagctacgggtatcagatattgaaaggatatcgaaagaaaaacagggcaatagggaactttgctttttaattaaactccaagcaagtgcttgctcaggaaggtaatgatatgactggcagtacgatttttagcgtggggatatatttcgggagagtttgcctcggatgagcgagcagttaacggatcaaatgctggttgagcgggtccaaaaaggagaccaacaatcgttcaatttactggttattcgttaccagcataaagtggcgagccttgtatctcgatacgtacctcagggcgatgtccctgatgtggtacaagaatcctttataaaggcttatcgcgcattggagtcattccgtggcgatagtgctttctacacatggttgtaccgtatcgccgtcaacacggcaaaaaattacttagtcgctcagggacgtcgtccaccatccagtgatgtggatgcaaatgatgctgaaaattacgaaaatgcgggcgcattaaaagaaatttcgaaccctgagaacttaatgttgtctgaggaattgaggcagatagtttttcgtaccatagagtcactcccggaggatctccggatggcgatcactttgcgtgagttggatggtttgagctatgaagaaatagccgccattatggattgcccggtcggtaccgttcgttcgcgtatcttccgtgctcgcgaagctatcgataacaaagttcagccgctgattcagcgatagcggacacataaagggtatttaggcatgcagaaagaaaagctttccgctctgatggatggtgaaactcttgatagcgaactgatgagttctttatcaaaagataacgaactgcaacaaagctggcagagttatcacttaatccgtgacactctgcgcggtgacgttggtgaagtcattcatcttgatattgctagccgcgtggctgctgcactgaaagatgaacccgtccgcttcgcaccagctgccgtgcctgaatctcaacctcagccgcatctctggcagaaaatgccgttctggaacaaagtgcgtccctgggctagtcaacttacccaagttggcatggctgcctgcgtttctctggcggtgattgtgggggttcagcaatacaaccagccagcaacagacactatgcagtctgaatctccggcctttaataccttgccaatgatgggcaaagcatcgccagtcagttttggtgtgccggttgatggaacttttggcaacagtcagcaaaagcaggttcaggaacagcgtcgccgtgtcgatatgctgagccaggattttgaattgcagcgccgtttaccgcaggatccgctacaacaagaacagtctgtatcgccgcaagccgctattcaggtgcctggaactcagtccttaggaatgcaacagcagtaatgaagcaacttttgttatccgtctgtttactgacgggcggcctgttcgtgccaataatcgcctctgctcaaaatgaaccagaggcgttgttgcaagaaatgggcagtgccagtcagtcactcaactatgagctaggctatattaatgtcaataaccaagggattgattctcttcgttatcgccatgctatatctgaaggcaaagcgttagctcagctattacgcatggatggacctcgcaccgaggttcttcagcgcggtactgaaattagctatttcgaacctggcttcgacccttttactctggccggtgatcacatagtcgatgctttgccttccatcgtgttttctaatttcaaaaatctggccaaatattacgactatattgccgtggggcgagcgcgcgtagccgatcgtccctgccaggttattcgtgttgtagccaaagatggcacgcgctatagctatattatctggctagacgaaacgacaaaattaccgatgcgcatcgatctcttggatcgcgatggagaaacgctggagcaattcagagtgatatccatgggggtaggtacgccgattcaaacggtattgcaaggtatgaaagctcttgagctaccaccattgctcgctttacctgcgaaacaaaaagtcgatttcgtctgggctccagcttggctgccttcgggaatggtcgaagtttctcgcagccgtcgaactctaccgaatctggatacgccaacggaaactcgattgtataccgacggattgttcagctttacggtgaacgtaaacccggccgataagaatgctgtgaccgggcaatctttgcgtcaggggcgccgtaccgttgaaagtgaagtacgcaatggcgctgaaattaccgttgtaggtgagattcctcccgctacggcgaaacgtattgccggcagcgttgtgttaaaggctaagaaataatgatgaaggaatgggccacggtgatttcgtggcaacagggtatagcgttgctgcgctgtgagcctcatgccggctgcggtaattgtcatgcccgcggcggctgtggcagcgacctgttgaataaacttggcccagaatctcaacatcagcttcaagtcgctatcgatcaaccgcttgaaccgggtcaacgggttgaagtgggaatcagcgaaggcagcttgctacgttcggcgatgttggtttacctgacgccgcttttcgggctgattgccggtggcgcattatgtcagaatatctttgtgaccgaggcaatgaccgcggttggtgcggtattaggcggaatagccggttttttacttgctcgaaggctggcggctaaggttgaggagcgggctgattatcaaccggttgtattgcaaataggtttaccgccgacggcgctgagaatccagcaagattgatttcaaattagtgatttatcgggctgtgataggctggtatgcggttttgaatcatatgttgaattaaggcaataaacagatctgcgctgattaattccgcataatttatcgaaaataaaacactcccttcatcatcaagcaggcgtatcgactcgttattattgcccttactcccagtttcaattctccgtatattctcgatatcaatgacgcgttgctgcgtggttaaagtgcgtgcgttcagcctaatggcatggggaataacctcaaccaggtcatgatcaataaattgattaaaccaagacggttttttgttaaccacatcaaagttgattatttctccctgaaatagtcgggtaagacaggcgtcgccagcatggctaacctgttgataaacgatatttcgcatcaaggggttagctcccatgatattagaaacgataatattccattgctggtggtgtgaggcgcgaaatgccattgcgtttatctttccccttggattaatccccaagtggaaatggtaaatatgcgtgattttatcaaaaggaatgaaataaactttttcactgtaatgattaaatacccgaacgccattctcatataagaaataggtaaagtccggcgtgatatataaccgggaataaagcaggacgctcagggataatgccgccagcagaatgcacaacaccaataatattgaaggcgtagaaaatacattggttgccgttgccaatgtgataatcaccagtgtcattactataataaaggcgacggaagccagtgtcagttttgagtttttcttactaaactcgtggcggctgagaattgggccttcatcgatcatcagacctccttaatggcgataaaacggtttcaccatttaggttattccaaggtgatttttatattctaggtgaggcgaatattgacgatatgaggtttttcctaaagtgaatgggtatttctgaaaagacatcagttacctcaatgagaaaataataagtgacttaggaggagagccaagaagagaatgacgtaggtttctttgagcatatctcccaaatccgcccaataaccactttatttaaatggatttaaactctgatataaatcagcaacataaaaatacggcgcgttaagctttaatgcgactatcctttaagccgagcgactcgcggttccggtattcatattaatgccaatgatgggccgctattgctctcgaggagtgtcctgacagagcgacttgatttcatctgaaagcaaggataatagtaaggattggcatgaggatgactaggttttcattgtcttgacatgtagaataccgcgacttaggcgaaagacagccaacctaacaacttacaatactgactgtcgctttatgtccatgcgtgtgtccataggcgaatgattcagaaataccaaggcagaaaaacttttataatgaagcatatacgaaatttctccattattgcccatattgaccacggtaagtcgacgctgtctgaccgtattatccagatttgtggcggtttaagtgagcgcgaaatggccgcgcaggttctggattccatggatctggagcgtgagcgcgggattaccatcaaggcacaaagcgtgaccttggattatcgtgctcaggacggtcaaacttatcagctcaactttatcgatactcccggtcacgtagacttctcttatgaggtttcccgctcgctggcggcctgtgaaggcgcactgctggtggtggatgctgggcagggcgttgaagcccagacattagccaactgctataccgcgatggaaatggatctggaagtggttccggttttgaacaaaatcgacctgccagccgccgatcctgaacgcgtagcggaagagattgaagatatcgtcggtatcgatgctgctgacgccgtgcgctgctcggcgaaaaccggtgttggtgtacctgatgtgcttgagcgtctggtgcgtgatattccgccgccagagggcgatccggaagctccattacaggcgctgatcatcgactcatggttcgataactatctgggcgttgtttctttgatccgtattaaaaacggtaccttgcgcaaaggcgacaagatcaaagtgatgagcactggccagacctataacgctgaccgcttaggtatcttcacgccaaaacgtattgaccgcgaagtgttgaactgtggcgaagtaggctggttggtctgcgcgattaaagacattcttggcgcgccagtcggcgatacgctgacgctggctcgtcaaccggcggaaaaatccctgccgggctttaagaaagtgaaaccgcaggtttatgccggtttgttcccaatcagctctgatgattacgaaagcttccgtgatgcgctgggtaaattgagcctgaacgacgcgtctctgttctatgaaccagagagttctactgcgctgggttttggtttccgctgtggtttccttggcttgctgcatatggaaatcattcaggaacgtctggaacgtgaatacgatctggaactgattaccactgcgccaaccgtagtgtatgaagtgattaccactagtcaggaaaccgtttatgttgatagtccgtctaagctaccggcactgaacaacattgaagagttgcgcgagcctatcgcagagtgtcatatgctgttgccgcaagagtatctgggtaacgttattacactgtgtatcgagaaacgtggcgtacagaccaacatggtttaccacggtaaccaggtggcgctgacctacgaaatcccgatggcagaagtggtgctggacttctttgaccgcctgaaatcaacgtcacgcggctatgcgtccctggactataatttcaagcgtttccagacctctgacatggtccgcgttgacgttttgatcaacaacgaacgtgttgatgcactggctctgattactcaccgtgacaacgctcaatatcgtggtcgcgatttggtcgagaagatgaaagagctgattccgcgccagcaattcgatattgcaattcaggcggctatcggcaaccacatcattgcgcgttcaaccgtgaaacagctgcgtaaaaacgtattggcgaagtgttacggcggtgatgttagccgtaagaaaaagctgttgcagaagcagaaagacggtaaaaaacgtatgaagcaggtgggtaacgttgagttgccacaagaggctttcctggccattctgcacgttggcaaagacggaaaataagttgtaaggagtttgaatggctaacatgttcgccttgattctggccgtagctacgctggtcacagggattatctggtgtttcgagcgtttcaaatgggcgccggcacgtcaggcaaaaattgcggctatcaatgcccaaacagcgggcacggtagatgagaaagctttatctaaagttgctcgtcagcctggctggatcgagacctgtgcttcgattttcccggtgctggcgctggtgtttatcgtgcgttcattcatttatgagccatttcagattccgtctggatcgatgatgccaactatgctgatcggcgattttattctggtggaaaagtatgcctacggcattaaagatcctattacccagacgacgctgatcccaacgggacatccgaaacgcggcgacgtggtggtatttaagtatccgctggatcctcgggttgattacatcaagcgtgtggttggtttgccgggagatcgggttagttacgatcctattgccaaacaagtaacggtgcagccagcctgcaatactggtcactcttgtgatagcgcgttagccattacttacagcgaatctgtgccgagcgaattcgtccagactttccgcttcagcggtatgggcgagtcttcggccggattcttccagattccgaccaataagccggttccagatgatggtgtacgtttgcgtcagcgcagcgaaagtttagggccggtttcccatcagattctgatggtgccgggtcggaacgatcagattggtgcttattatcagcagccagaccagccgcttggcgtttgggtggttccggaaggtcactactttatgatgggtgataaccgggataatagtgcggatagtcgcttctggggcttcgtccctgagcgcaatctggtgggtaaagccactgctatctggatgagttttgaaaagcaggaaggtgaatggccaacgggtgtgcgtttaagccgtattggtggaattcattaatctgagcggtatcctgattgactggcgctgttggctggcaataatccgataaatcccgataagctgatcgacatcagcaatttgggcggtgaatgccccaacaacgccagaatttcaattaataagggtatatataaacgcagcattatgtttccacacgttgtagaataacctttcgagcgataaaagttggcttcctgttggaggcactgcaaacgaaacagctttgtgttggcttgggcgaagcagacctgttccgtatgctgtagtttttgacgcattcttgatctattggtaactcatgaatcccatcgtaataaccaggctacagcggaagctgggctatacttttcaacagcaggatctcttgctgcaagctctgactcatcgcagcgccagcagcaaacacaatgagcgtttagagttcctgggtgactcaattctgagttttgttatcgccaatgagttgtatcaccgcttccctcgcgtagacgagggcgacatgagtcggatgcgggcaaccttggttcgaggcaatactctcgccgaaatggcccgtgaatttgaccttggcgaatgtttacgccttggcccgggtgaattgaagagcggcggttttcgtcgtgaatccattttggcagatacggtagaagcccttatcggcggtgtgttcctcgatagcggtattcaaacggtcgaacggctgattttggactggtatcgtagccggttagatgaaatcagccccggtgacaagcagaaagacccaaaaacgcgtttgcaggaatacctgcagggtcgccatctgccgttaccttcttacctggttgtgcaggttcgcggagaagcacacgatcaggaatttactatccactgccaggtcagtggcttgagcgagccggtagtcggtactgggtcaagtcgtcgtaaagctgagcaggcagcagcggaacaagcgctgaaacagttggagcttgaatgagcgaagtagaaaaaacgtattgtggttttattgcaattgttggtcgtccgaacgtgggcaaatcaaccttgctaaacgagttgttgggtcaaaagatttccatcacctcgcgtaagccgcagacaacccgccaccggattatgggcatccatactgaagggccttatcaggctatctatgtggataccccggggctgcatattgaagaaaaacgtgccatcaaccgtttgatgaaccgagcggctagcagctcgattggtgacgtggaattggttatttttgttgtcgaaggaactaactggaccgccgacgatgaaatggtcgtgaataaactgcgcagcttgaaatgcccggttctgttggctatcaacaaagtggataacgtcacggataaaaccaagctgttgccacatattcagttcctgagccagcagatgaatttccttgatgtggtgccaatctctgcggagaaaggcatgaacgtggacaccatcgcggccatcgtgcgtaagcatatgccggaagctgaacatcatttcccggaagaatacatcaccgaccgttcccagcgctttatggcgtcggaaattattcgtgaaaaattgatgcgcttcctgggtgaagaactgccttactcggttaccgtagaaatcgagcagtttgtgccgaatgaacgtggtggttacaacatccacggtctgattctggttgaacgtgaaggccagaaaaaaatggttatcggtaacaaaggtgccaagattaagactattggtatcgaagcccgtcaggacatggaacaaatgtttgatgccaaagtgcatcttgaactgtgggtgaaagtgaaatcaggctgggccgatgacgaacgtgcattgcgcagcttaggctataccgacgatctgaaataagactcgtcgatggaaggttggcagcgcgcatttgttttgcatagtcgcccttacagcgaaaccagcctgatgctggatttgtttaccgaaggggaagggcgcatgcgagttttggccaagggtgcgcgtggccgacgttccaatttaaaaggctgtttacagccttttacgccattactggttcgctgggccggtcgtggggaagtgaaaacactacgtaatgcggagccggtttctctggcgctgccactcagcggatcgatgctttacagcgggctgtacgttaacgaactactgtctcgcgtactggagcacggtactaactattctgcattattcttcgattatctccattgcttacaagcccttgccgcaacggacggttcccctgaacacgctttacgtcagttcgagctggctatgctatccagtctgggttacggcgtggattttctccattgcgccgggagtgggcaagccgtcgctgacaccatgacttatcgctatcgggaagagaaaggttttatcgccagtttggtggtggaccactacagttttaccggacggcagctacaggcattggccagtcgggagtttcccgatgctgatacattacgtgccgccaagcgttttactcgaatggcgttgaaaccttatttgggcggtaaaccgcttaaaagtcgtgaattattcagacaatttgtaataaaacctcctgccgacccgacgcagacatcctgattttattgatttttaatccgttctgtatcaactttccccgatcctaacctatccgctgcgcctgcactcggtgtaaactgcgggctgttaacctatcttactacgggcttttctggagggctgtcatggctgatttgctgctaggcgttaatatcgatcatatcgctacgttacgaaatgcgcgtggtactcactatcccgatccggttcaggcggctttcattgccgaacagtctggtgctgacggtattaccgttcatttacgcgaagatcgccgtcatattaccgatagagacgtacggattttgcgtcagaccattcagactcgaatgaacctggaaatggccgtcacggacgagatgctggacatcgcctgcgacattcagccgcacttttgctgtctggtgccggaaaaacgtcaggaagtgaccaccgaaggcgggttagacgttgccggtcagatcgacaaaatgacgttggctgttggtcagcttaccgacgcggggattctggtttcgctgtttattgatgccgatatgcgccagattgacgccgcggtggcggtaggtgcaccttacattgagattcataccggcgcttatgctgatgctaaatccgatctgattcgtcaggcggagctgatgcgtattgccaaagcggcggcctatgccgctggcaaaggtctgaaagtgaatgccggacacggcctgacttatcataacgttcagcctattgctgccttacctgaaatgcatgaactgaatatcggtcacgcgattatcggccaggcggtgatgaccggcttgccggctgcggtttccgaaatgaaaaccttaatgcgggaagcgcgtcgctgatggctattttggggctgggtactgatattgttgaaatctcacgtatggaagctgtggtgaatcgcagtggagagcggctggcaaagcgagttctcagcccggcagaatggcaacagtatcagcaacatcagcagccggtgcggtttctggctaagcgttttgcggtgaaagaagcggcagctaaggcgtttggcaccggtattcgcaacggactggcattcaatcagtttgaagtcgtcaatgacgttttaggcaagccgacgctgcacttacatggccgcgctgcggagctggcgctggagctgggcgtggcatctctgcatgtttctttagcggatgaacggcgctatgcctgtgcaacggtgataattgagagttaatcaggatttaatcgattcggatcttggcaagggcgtatttatacgccctttgttgcaactgcggcgcggttacaggcggtcggcgtgatgcagcagaacgtatttatcccatagctgctcgttagtttcgacgcaggccggatcggtaataatagtgttatcaatcgggcaaaccaattggcaggtaggcgtttcgtagtggccgacgcactctgtacagcgcattggatcaatttgataaatttcttcgcccatcgtaatagcctgattcgggcactccggttcgcacatatcgcaattaatgcatttacgcgtgatcaacagggccatgagttcgctacctttggtgtgggggacataaatcagccggcgattataccgctatcatcgccttagaccagttttttcaccagatttgcgctgtggttgatgtggtcttgcgcctgatcaaaatcttgctggatgattgccataaagagcaaatcggtgagagcaaactgagcggtgctggaggagattgccgcgctgcgaatggccggttcttccgcaatggtatacaaacaatgatcggcgcgttgctgtaggccattaggggaaaaactggtgagtgccagcaccttggctcccgcagcccgcgcttcctccgccgccagattcacttcccttcgttcgccgctgaaagatatggcaagcagtaaatcctgtggactcatggcctgaaccgtcgctaattgtacgtgcatatccgcttcggctaccgccataatgccgattttcaacaacttataggataaatccttcgccacaagtccagaagcaccgatccccagtaggataactcgacgagcatttttcagcatttccagcgccatgagcaggcgttcttcactgttgatatccagcgtggcgcgtagagcggcctgcttttctgccaatagcttttcacctacggtttttaaaccatcggtactgagaatctgattatgtactttcaccgcggcctgcggtgtggccaccacttcgctcaacgccagttttagcgccggaaagcctttatatcccagtttttgagcaaatttcactacgccagactggctgactccggccatttgcgccaatttctgcgagctgagatgccgcgcctgttcaggattttccagcagaaaatcagccagttttcggtcgttttgcgccaatgtagggtagatctgtcgtatgcgtagaagactgctcataacaccattcctgaaagcgggaagacattctgccatgtttagcgctaaaaaatcagatcgggcgcatggatagggttaacttaccgatttttgtgatctctgctctaaagatagccaaaaacactcgccttgttgaatataatattcaattataaatatattaatgtgaattaaaaattcaatgaggtgacgtatgaacttaggtactttggtatcagaaagccgtaatccggcaacaagggatctggataaattatccaccctggaaatggtggagcgttttaacgatgaagatcgtaaggttcccgatgcgattcgtttagtgttacctgaaattgcgcaggcggttgatttagctgccgaagctttgaaggctggcgggcgtctgatctatctgggagcgggaaccagcggtcgtctgggcgtattagatgcatccgagtgcccacccacttttggcgtgcctcacggattagtgatcggcctgattgccggtgggccgggagccttactgaaggcggtagagggggcggaggacagcctgacattaggtgcggaagatttacaggcattgaagttaacctccacggatatggtggttggcctggccgcttccggtcgcacgccctatgtgatcggcgctttgcgctatgctcgcgagttaggttgcccaacggttgcgatttcctgtaaccctgactcacctattgcgcgggaagcgcagctggcaatttcccccgtagtagggccggaagcgttaaccggttcaacgcggttaaaatccggaactgcgcaaaagctggtgctgaatatgctgtctactggcgcgatggtgaaattgggcaaggtgtatcaaaacctgatggtggatgtaaaagccactaacgtgaagctggtggatcgcgcctgccgcatcgtggtggaagccaccggcgcaggaagggaagaagcggaaaatgcgctgaaacagaccgattttgaggttaaaccggcgattttgatgatcctgaaaggcgttggcgcagagcgggctcggcaggatttggcgcagcataatggttatctgcgcgccgctttatagcgctcagcctgaggatatgtggcaatggataaatcaaccgctttagcgcagcaaattttggtcggtattggtggcgaagccaatattcgaaaacttgaaaattgtatgacccgggttcgagttgaggttaaagacgacaatctgctggatttatctcatttgaagcagttaaccggagtcaaaggctatattaagcagggggaacagcatcagtttattgttggccccggcgcggcgtcgaaggtggttgagcgcatgcggggcctgatggttggaaaaacagaagacatcgctgaaaccgatgcgatcggtcgaaataaagcgcaggccaaagctaaatatgcggctccaatgagcggtgcgctgaagaaactggctgacgttttcatcccgctaattcctgcatttattgcttccggcttaattatgggaatagtgaatattctcaagcgtccggatatttctggcgatttagcgctgcattacccgaatattctggggttgttggcgatctttggcagtgcagtgtttgcgattatgaatattctggtgggcgtcaatgccgccagagtgttcggcggttcgcaggcaatgggcggcgtaatggccggtattttatccagcccggcgctggcgcaaattacgctgtttggcgaagcgttgcagcctggtcgcggtggagttattgccgttttactggttgtggcattgatgtgctggatcgagaaatggttgcgtaatcacctgcctgaatcgatagagcttattgtcaatccgttgttaactacgctaattaccgcctctttggctattttgctgctacaaccgctgggcgggtatatttctgaagtgattacccacggagtcaatttggctatcgatcgcggcggactgtgggtcggcgcgctgctgtccgggctgtttctgccgctggtactgtccggtttacatcagggattggtgcctattcacgtagagctggtgcaggctcacggcgccaatccgttactgccgatactggcgatggctggcgtagggcaaattggcgccgcgttggcggtactgatgaaaacgcgcaatgcgcgtctgaaaaaagtgattaaaggggctctgccggtcggcattttaggcattggcgaaccactgatttttggggtgacgttacctttaggtaaaccctttatcggcgcttgcttggggggggcaatcggaggggcgttaatcagctattggaaagtggcgacggtgataaccttcgggatttccggcctaccgctggctttgaccattatttccggcaaagtcatgttgtaccttttggggatggcaatcactattctggccggttttatatttacctggattatggggtttaccgatccagaagaataatagcgtaacgctgttcatggtaaggaaaaaggcggtagtatcactttaggatatcgctctgtcgacgcggatttggcagagcgaaagacattttgaggagtgataagttgatgccagaatcgaccttagcaaacatcgcgccgcaggccgctgaaggcaaacgcgttgtattttttgatttagacgggacgctgcatcagcaagatatgtttggcagctttttgcggtttcttactcgtcgcttacctcttaatttacttctggttattccgttattacccgtcgttgggattggcttactggcaggaggccgctgcgcccgctggccgcttagcctgctgttgtggagcatgaccttcggccgtagcgaatctcatctgaaagatctggagcggcgcttcgtgggggcgtttcgtcagaaagtggtgggttttcctgtagtaaaaatgcgcctgcggcagtatctggaacagcaagatacgcaggtgtggctgatcaccggttcaccgcagcggctggtggagcaggtttaccatgattctctttatctgcccaagttacatcttgttggtagccaaatggcgcgatgcaacggcggctggattttgccgctacgctgtctggggcaggaaaaagtggtacagcttgagcagcggctcggctctcccttgaaactttatagcggttatagcgacagtaggcaggataacccgttgctgtttttctgcgaacaccgctggcgggtgagtaagaacggcgaattacagcggttagagtgattgttttcctggaataaccgcagggtttgccgctgtttttcatgactttaaaggctcggttattgagttacgtcagttgttgcctcaatgtgttacatcggtattactatggcctaaacgccagattttttccgcgtagcgaccgagtaaccataagcttccgcccagaatcacgaaaaacagcgttttggtcagcgaatcccaaaacagttcgaaaaaacgggtgtacagattgatggctaaaaaggttaagccgaagccgcgaagcatggcgtcatctcgcttcaaacccagccatatagcggctcctgccgccagagcaaacagtaggctccaatgaaacagcgcgatctggcgcacctgataccagccgtcaatatcaccgtaattgccgaagatcgacagtaaccataaagcgagaaataggtatagcagccccattgcttgtgaaacccgttccagccgccgctggcgcagcgggttttgggccagcagaacgaccgatatcagtatcaaaccgaaaagaataaagcgcagcgggtagttcaggcccagccaataagctccccagccggaaaggtagcccgtttctgcgccaaaggcgttccccagagataacagagcaaatagccagaccaagggggagcggcctagccagccgattagtgcataaattcccgcaccgagcagcaataatagagaaacgcggccactgccgttatccagccaaatgcctaagtagcctaaagatgttgcggtaaataatacgccgagaaacagcagggcttcattgctgtaaattttatctgggctgaggcgataacggcgaaatccccaataatagaatgtaacggcaatccctgcgcagattacggaaatggccggagcgtcgaagcgcaggaattggctaatccaggcaatgagaacgctgtcggcaaacaggctggcaacggcggtagccaggcaagcgagcgcgcctaaaaaggcatagctcgccagtctgcgccaatcaaaaggctgaatcacaacgtgctttaacaggcgctgatgttcttccggcgcaatgacgccttcactggcccagccatctagggttttctgtaccaccgccgcattttttttgctgagtttcatatccaggttcccttgtatgacaggttctctcggcggtttaagccattgcttcgggtcagcaatgtgaaggtgacggcgagattttctatgtattcttcactttactgtattgatgacttttattgagtataagtaatagatgaatagcccggtagcgatagtctgagtacttcgggcggacaaaatccccgttctgcgcctgcgctgtgtataatgcccgccgcaaaagtgcctgagaggtgaatgtgtctattgaatataatgatgaatactggatgcgtcaggcattagagctggcgcagcgcgcgcaggaagagggcgaagtgccggttggcgcagtgttggtgttagataatcaggttattggcgttggctggaaccgacctatcatccatcatgatcctactgctcacgctgaaatcatggcgttacgccaaggcgggcaggcgctacagaactatcgactgcttaacgcgacattatatgtcacgctggaaccttgcgtgatgtgcgccggagccatggtacacagccgtattcgtcgtctggtttacggtgctgacgatgtgaaaaccggcgcggcaggctcgttggtggacattttgcgtcatccggggatgaatcatcaggtcgaaattacttccggcgttctggctgaggcatgttctgctacgctgagcgcctttttccgccagcgccgggagcagcaaaaagcgctgaagcaggctcgccgcgccgctgcgcaaaacgagccagaatagtccttgaatcggtcagttattaatcgaccagcccggcccaaccaccggataggctttgcctaattcagcttcgatagccgcactttgcgcggcttttttctctttatcctgcaaataacccaccaaactgacctgatagcgccggatgttttccacgtagttataagcctcatgcccacgggcatagccgtaagtcgtactcgggtaatagcgcttctggctcagcatcggcaaacgcatttttacatctacccagctatctggattaccgttctggcttttggtcagtttacgggcatccagcatatgaccataacccatattataagccgccaatgcaaaccaaatccgctcgtcttccggcaccgtttccgggatctttttcatcaaacgttgcagatataccgatccgcctttgatgctttcctcagggtccagacggtcttttacgcccaaaccgtctgcagtggcgcgggttagcatcatcaggcctctgacgccggttggtgaggtcgcctcgggattccagtgtgattcctgataggcgatggccgctagcagcttccagtcgatttcaccggcgtgcttctcaaacagcggctggaaggttggcaataccgtgtctatggctcttaggaaggttttggtatccacataatcgaagctgccaacgtggcccagatatttttcttctaagcgcgccagactgccgtcttcaaccatttggctgtaaaaatccagcagtgcggcatacaggctgtcatcatcgctacgcttaaagtaccaggtgaccggttcttcatcggtaacatcgaaagctaccgctaactgcgggtggatgcgctgcaacagggcaatagtgatggaatcgcctatagtgtaatccagcttgccatcggccacctgctctaagagttctttagccgagcgatcggttgaggactcccagctcaaattcgggtacttgccctgttttagctgttttagcgccgccatgtgcgcagaaccggcggccacggtcagttgcccttgcagatcgttaaaggtttttgggcgggttttgcccaaccgatacaccaactgttgggaaaccgaatagtatgcggggccggtgcgcgcccgattcaggcgttcactgttataaatcaggcctgcggccagcaggtcggcgtcgttgttgtccagatcttcgaacaggtcatcgatattgttacgggtcgtaaccaccagcttcacgccgagataatctgcgaagcgctttgctagttcgtagtcaagaccggtagggccatctttacctggggtgtagatcagcggtgagttcatcgtactgatacgaagctctccgcgggctttgatctggtcgagttgtccctcctgaccgttgcgccaggaaatattcggccatagcgcaagagccagaagcaaggtaacaacaccgataaaaaaataatttaatttaaggcgcgtcaaatagttgtctctcggcagcgcggggttgtgcgttatatataagggcgatttaacatggttaaatccccagtgcgggggcattttgcgcaacaaaacgccagtgtgcaactttattgacactttatgataattcgacgacttctcgcgctattatcaataatagatacgcaaacggtttcgtcggaggccgagattctctataatggcgcgcgttttcccctgttgcgcccaatgaagtgctgttccagctgcttcgaagacgagagaaacttagattatggaaatactgcgtggttcgcccgctttgtcggcttttcgcattaccaaattgctgtcccgttgccaggacgctcacctgccggtgagtgatatctacgccgaatatattcattttgccgacgttagcgcgcctcttcgcgctgatgagcacgccaaactccaacgacttctccagtatggtccttctctccctgaacatgcccctcaagggcgtttgctgctggtcacgccgcggccgggcacgatttctccctggtcttccaaggcgaccgatattgcccataactgcggcttgtctcaggttttacgtctggaacgcggtctggccttctatattgatgcgccagagctgaccgaaacccagtggcagcagttggtcgctttgttgcacgaccgcatgatggaaacggtatttaccgatttgcagcaggcagagcagctgtttgctcatcagcaccctgcgccggttcagcgggtagatattctgggcgaaggccgcgcagcgctgaagcaggctaatatcaagctgggtctggcactggcggaagacgaaattgattacctgctgaatgcctttaccggtttggggcgcaacccgacggatattgagctgtatatgtttgcgcaggcgaactccgagcactgtcgtcataaaatctttaacgctgattgggtgatcgacggcgtggctcagccgaaaacgctgttcaaaatgattaagaacactttcgaacaaaccccggattacgtgctgtctgcttataaagacaacgcggcggtaatggccggttcgcaggttgggcgtttcttccccgcgccggaaaacggtgtttatgattatcatcaggaagatgcgcatatcctgatgaaagttgaaactcataaccacccgacggcgatttctccttggccgggtgccgcaaccggttctggcggcgaaattcgtgatgaaggtgccaccgggcgcggtgctaaaccgaaagccggtctggtcggtttctcggtatctaacctgcgtattcccggttttgaacagccttgggaagaagatttcggtaagccagaccgcattgtgacggcgctggatatcatgaccgagggtccactgggtggcgcggcgttcaacaacgaatttggtcgtccggccctgctggggtatttccgtacctatgaagagcgggtcaatagccataacggcagcgaactgcgcggctaccataagccgatcatgctggcgggcggtatcggtaatattcgtgccgatcacgttcagaaaggcgaaattaccgttggtgccaaactggtggtgctaggtggcccggcgatgaatatcggtttgggcggtggcgcggcatcttccatggcgtccggccagtccgatgcggatttggattttgcctcagtacagcgcgacaacccggaaatggagcgtcgctgtcaggaagtgatcgatcgctgctggcagttgggcgagcagaacccgattctgtttattcatgacgtcggtgccggcggtctttccaacgcgatgccagagctggtgagcgacggcggccgcggtggtcgctttgagctgcgggacattctgaacgatgagccggggatgagcccgctggaagtctggtgtaatgaatctcaggaacgctatgtgatggcggtagcgccagcgcaaatggcgcagtttgatgaaatctgccgacgtgaacgcgcaccctatgcggtgatcggtgaagcgacggaagaactgcatttgacactgaacgatagccatttcggcaaccagcctatcgatatgccgctggatgtgctgctgggcaaaacgcctaaaatgctgcgggatgtcaccagccagcaggcgcagggcgaagcgttgaatcgtgctgaaattagcattgccgatgcggtaaaacgcgtgatgcatctgccagcggtcgcagaaaaaaccttcctgatcaccattggtgaccgcaccgtcaccggcatggtgactcgcgatcagatggtggggccttggcagattccggttgccgactgtgcggtgaccagcgccagtctggatagctattacggcgaagccatgtctattggggaacgtgcgccggtagccttgctggactttgccgcttccgcgcgtttggcggtgggtgaggcgctgactaacattgccgcgacgcaaatcggcgaaatgaaacgcattaaactgtcggcaaactggatgtccgctgccggtcatcccggtgaggacgccggtttgtacgaggcggtgcgcgccgtgggtgaagaactttgcccggcgttgggtatcactattccagtgggcaaagactctatgtcgatgaaaacccgctggcagcaggatggcgaacagcgcgaaatgacttctccgctgtcgctggtgattaccgcctttgcccgaatcgaagacgtgcgtcatacggttacgccgcagttgcgtaccgataaaggtgacaatgcgttgttactgatcgatttaggcgctggtcacaatgctttgggggctacggcactggcgcaggtttatcgtcagctcggtgacaaaacggccgatgtgcgcaacgtggagcagctggctggcttctttaacgccatgcagtcactggtagccgatcagaccttgctggcttatcacgaccgctctgacggcggcctgttggtgactctggctgaaatggcctttgccggtcactgtggtgccgaagtggatattcaggctttgggtcaggatgcgctggctgccttgttcaatgaagaactgggggcggtgattcagattcgcgccgagcaccgcgcggccgttgaacaactgttcgctaaacaggggctggcagagtgcgtgcattacttaggacgcgcgaccgtcggagacgatttcgtgatccgcagtggaaacgacacggtttatcgtgaaaaacgcagcactctgcgtctgtggtgggcagaaaccacctggcagatgcagcgcctgcgcgataacccagactgcgccgatcaggaacatcaagccaagcagaatgagcaggaccctggcctgaatgtgaaactgacctttgaacctcaggaggatattgctgcgccttatattcttaaacaggttcgtccgaaagtggccgttttgcgtgagcagggcgttaactctcatgttgagatggcggcagctttccaccgcgccggttttgatgcggtagacgtgcatatgagcgatttgctggctggtcgcatcgatctgcgaggttttcagaccctggtagcctgtggcggtttctcttacggtgatgtattgggtgctggcgaaggctgggccaagtctatcctgtttaataaccgcgtacgcgatgaatttgccgagttcttcctgcgtccggaaaccctggcgctgggcgtgtgtaacggctgtcagatgatgtctaacctgcgggaactgattccgggggcagaacattggccacgctttgtacgcaaccagtctgaccgctttgaagcgcgtttcagtctggttgaggtggctgacagcccgtcactgtttatgcaggatatggttggttctcgtatgcctattgcggtttcgcatggtgaagggcaggttgaagtgcgcgatcggcagcatctggccgctttggaacagcacaatctggtggcgctgcgctttgtgaataataagggtgaagtgaccgagcagtatccggctaaccctaatggctcagtgaacggtattaccgctgtcaccagcgccagtggccgtgccacggtgatgatgccgcatccagagcgtgttttccgcaccgtgagcaattcgtggcatccggaagagtggggcgaagatagtccgtggatgcgtatgttccgtaatgcgcgtaaacagttaggctaacgatccgttggtttaaatatctaaggggggcgaaatgcccccttttgcttatcgatatcacttatcgatattgattgacgtttggtttgtctgaatcggtcccaatttcttatcacaccgtgaagctatagcttatttctttcatttctttattattatctaagacttcaataattaacctatatgttcctggttgaatattgtgcattttgattcttattggtatcttgtcattattaataaaaccattaatgctgattagctctgcgttattgctgttgacgacataaatgtaatagttcagtctgccatgggcttcaaagtcgaatttaattttatattccgcagcttcttgactgtaataataatgtaggtctgttatttcaaagtcaggaatataactgatatgagataacggcctaatccctgaaatggccggtaacatagccaattgcccggtactgatgacggtcgagcgaatgtcttggcgagtgcgagttacatcattggcaaaggcggtggcagataaaatgattaaggtcgaacacaaaaatccgagtttatttaccgtcatacatcctcctgtgttatctgcgtcatggataacatgagtggcacttttattactgatagtgatttttttcggtgaatattatgaagcgttgcgttctatttcaggttttcatagctatgaaaatccctatgtaattttatgttaattaagattcagactgtctggttataaagatgtttggctgtgaagtagtataaaattcattgtgttttcaaaactgatatttttcgtattggaaactagccgaaatctaattacagatgtccactcatagttcgtcctcttgtattcgacactgcattaagacactgcattaaattgttcattaatcagttaactctctgttggcatcgggttctctggctgcgaggtagagcagccattttttgcctcgccggatgcggagctttgttccgagctagcgatgggttccttcgtcgacagcaaccgccgacagcaactctttgcgcgggcatctggctatgatgctgacaaattttccttatctatgaaatatcattatttataagtaacgagattaggtttgatgaattcccacatgagatgaagatctcaatttgttgaaaaatatatatttttatttttgtgtcggtaaattgcgacaacagcataaagcggtgtctcaaataggagacatataacttcatgatttttaatgtttttattattgatgcttttgggtgtcgtgaattagagacagaaggctaataacgcgttaactgtttaaccgttgtttttaagttataattatgaattatttaaataactgtttattttcaatgtcttagtatttttattttaaagttggcacggtaactgcattatcttaatcagttgctcattcacctttttatgacagccccgcagttaagcggaatatgcgcttcataagccatcgaatgacgcctaagaatggtgcctatcgtccacctaaaccgatattgccgcgcaagcgctttatcaagcatcggacgacacgttgagtgaggcaccgcctatgtcctactgtgatgaagggttcatcaatattggacatgtttggatgctattcgtctcatccccccgatgattgcttcggctcatcaaactggaggcgattttcagggcatccacatattcttgctaatgggggcaatagtgttattgcccctgttaagcaaatcagcaataccttcagattcgttcaaacatcgatatcgcaatcatttctcattcgattgagtgttgatacaacaggctgatcgcatcgatgaatcaaaattgtggaaaccagtttcctattaaaattaagcactttgctcatagcaggtgctttttttttgctcgaaaatcagcggtcgatgatttgttgatgaaatagtgcgggatttatgcggtaacagacattgtaatcctctgagagtcggttagcatcaaagcagaataataggtaatgagatgatttcgttgaaaagatggcgtttattccctcgttcgttgcgtcagctggtactgatggcgtttctgttggtgcttttacccttgctggtactggcttatcaggcttaccaaagtttggatcatttaagcgagcaggcggcagatatcaaccgtaccacgctggcggacgcccggcgcagcgaagctatgaccagcattgctctggaaatggagcgtagctatcgccagttttgcgtattgggcgatccgacacttgccaagctgtatcaacaccagcgtaaacagtatgcccaaatgctggatagccatggttcgatcttgcctgacgcccactattatcagactttacgtggcttactcactcagttggaagaaataaagtgccagaacagtgggccagatgcgcaatcttcggagcaactggaaggtttttctcgctctaacgccgaaatggttcaggccactcgtgacagtattttctctcgtggtcagcagttgcagcaggatattgctgaacgcggacagttttttggctggcaggcgttgttgctatttttggtcagcgtgattctggtggtgctattcacccgcatgattatcggcccggtgaagggaatcgagcgtatgattaatcgcctgggagaagggcgagcgctaggcaatacagcgttgtttaaagggccgcgtgagttgcgttcactggcgcagcggattatctggctcagtgagcgtctggcgtggctggaatcccagcgacacgagtttttacgccatatttctcacgaactgaaaacgccgttagccagtatgcgtgaaggaacggaattactggctgacgaggtcgccgggccgttgacgcaagatcaaaaggaggtggtagccattttggataacagtagccgccatttacagcaactcattgaacaattgctggattataaccgtaagctggcagacggctctggcgagcatgaaaatgtcgaactgttggaagtggttgaaggggttatttctgcccatagtttgccagccagagccaagcaaattcgtaccgaggtcgatctgcaagcggatatctgctgggctgaacccacattattaatgcgagttctcgataatctctactccaatgcggtgcactatggcgaggaatccggtaccatttggatccgcagccgtcaggtgggaaatcgggtacaaattgatgtcgctaatactggcactccgattccgctagccgaagaaaccatgatatttgagccttttttccagggaagccatcagcgaaaaggggccgttaagggaagtggactgggactgagcattgctcaggattgcatcagacgtatgcagggcgaactgcatctggtagaacaggatgatgcagccgtctgtttccgcattgaattgccattaaccgccgagaatgaataaataatgtacaagtggtctgtcagtcgcttttttaaaaagaccgaatctttgccgcgctccgccctggaggctgtcgcaacgccatcttatcgtaaggccgcttttttggggacgctgttacttgccccactactattgagtggatgtatcgatcgttccgccaacggacgcttttcccatgcggtgcagttggtgattcccgaaagcaaaattgtggattaccgcaccgctcaatgtgacacgctgtgggatatcgaagataaagaagttctggagaattcgctttattggctgagagcgatggactgtgccgagcgtttaagcaccgcgcagtccagagccttggccaaatctatgcaaaccctatcctggtcaacggcgtttaagcagggcattttgatcggcagtgctgatccatcaatggccgagcgtcgtcagatcgttgagcgtctaaatagctatagccagactttccccggttctctgcgcccgctgattcagctatggcgggaacagcaagtgctgcgtattgctctttccgaagaacgtgcccgttatcaacgtttacaggatgaatcggacagccagattgatcgcctgagggaaagtcaggtgcgtctgcaatatcatttacaggacaccacccgtaagctggaaaacctgaccgatatcgagcgtcagctttcttcacgtaaacaactgcaaaatgaaatttctgagcctgaggcagaaatcaaagccgccgctgggtctaatccagagccggccaaagcggctgaaatgaaagaagagaaagcggcagagaaaaagtcggtagaggcaagatcggtagaaacaaaatcgatagaaaccaagccggtggaaaccaagccaacagaaaccaaacctgcggcagaaaaatcggccaagccagtggaacccgcagctcagccgaccactccggtaacagcgccggaggccaaaccggcagaaacctactcgcctccggccacccagccgtcacccgcttccaaaaaggagtccgagccacatgacaccacgcaaaccggccaatctactgctggttgacgatgatcccagcctgctcaagctgctgggaatgcgtctgacaagtgaaggtttccatgtcaccacggctgaaagcggtcaggaagccctgcgcttattgatgcgcgagaaaatcgacttggtgatcagcgatttacgcatggatgaaatggatggtatggcattatttgccgaaatccaaaaatatcagccgggtatgccggtgattattctgaccgcgcacggttctattcctgacgccgttgccgccactcagcagggcgtattcagcttcctgaccaagccagtcgatcgcgacgcactgtataaagctattgatgccgcgctcgaactttccattcctgccggtgatgatagctggcgagaagccatagtgacccgtagtccgctgatgctgcgtttattggagcaggctaaaatggtggcccaatctgacgttagcgtgttgattaatgggcaaagcggtaccggtaaggaagtgttggcgcaggcaatccacggcgccagtccgcgcgctaaaaaagcctttattgccataaactgcggtgctttaccggagcaattattggagtctgaactctttggtcatgctaaaggggcatttaccggcgcggtaagtagccgggaaggcctatttcaggctgcggaaggtgggacgctgttcctcgacgaaatcggcgatatgcccttatcattgcaggtaaaactgctgcgagtgctgcaagagcgcaaggttcgtcctttgggcagcaaccgagatttggatatcaacgtgcggattatctcggcaactcaccgtgatttgccgaaagcgatggcaaaaaatgaattccgtgaagatctttactaccgtttaaacgtcgtgaacctgaaaattccggcgctgaatgagcgagcggaagatattccgctactggctaatcatctgctacgtgaatccgccaaacggcataaaccttttgtgcgcagtttctccaccgatgcgatgaaacgactgatgaccgccagctggccgggcaacgtgcgtcaattggttaacgtcatagagcagtgtgttgctttgacctcggcgccggttatcagcgaagcgttggtcgagcaggcgctggaaggggaaaacaccgctttaccgacttttgttgaagcgcgtaaccagtttgagctgaactatttgcgtaaactgctgcaaattaccaagggtaacgttacccaggcggcgcgaatggcaggccgtaaccgcactgaattctataaattgttgtcgcgccatgaattggacgccaacgatttcaaagaatagtgctttctttcctcggaacccgattggaaaaggcgttcggcgggttctaaacaaatgaccgggaatgatttacacttcggtctttgttgtggcatagcagaattgaaaccaatatgaacagaacactttccattgcgttagcccagcttaatctgctggttggcgatattgaaggcaacaccgagcgtatgttgcaaaccttacatgagcagcaaaaggccggtgccgatctggtcatgttttccgaactggcactgtcgggctatccaccggaagatttactgtatcgggatgatttctacctgcgctgtgaggcacagttagaccgtttacaggccgcagcgcaaaagacggcggttctggtagggcatccgtggcgtgaagggaataagctgtacaacgccctgtcactgttctccgaaggtaaattgcttggtcgctacttcaaacaacagttgcctaactacggcgtgtttgatgaaaaacgttatttcactcctggcaatgaaagctgcgtggttgagctgaaaggctatcgtttagggctattaatctgtgaagatctgtggttcaaccagccggtagacgctgcgaaagctgcaggtgcagagctgctgctgtcgattaacgcctcgccgtataaccgtgaaaaaccttatattcgcaaaacgctgatggcttcccattgccagcgtaccgatttgccgctgatttatttgaatcaggtgggcggtcaggatgagctgattttcgacggttgttcaaaagtgtttgattctaaaggtaatatgacgcatcgtctggccgcctttgcggagcaaacgacgctatgccgcttccaggatttggtcgtcgagcccatggcggcaccggcggcggggttgtctccgctggctgaagtgtatgaagctctggtgctggcagtgcgtgattatgtgaccaagaacggctttaaaggcgcggtactcggcctttctggcggtatagattcggcgcttacgctagcgattgccgtagatgcgctgggtaaagagaaggttcaggcgttaatgatgccgttccgctataccgcagacatcagtattgccgatgcgaaggaagaggctgaaatcctgggtatcgaattcgatattctatctatcgaaccgatgtttgatgcttttatgggacaactggcgccgatgtttgccggtactgaaaaagacaccaccgaagaaaatttacaggcgcgctgccgtggcgtggtgctgatggcattatcaaataaacgccgcagcattgtgctgactactggtaataaaagcgaaatggctgtcggttatgccacgctgtacggtgatatggcgggtggctttgacgtgctgaaagacgtacctaaaacgctggtatttaagctgtgcgaatatcgcaataccgtttcttacgtgatcccgcagcgggttatcgatcgtccgccgtccgccgaactggcgccggatcagttagatcaggacagcctgccgccttacgacattctcgatgcgattctggaaggctacgttgaacatgataagtcggtagccgatttggtggctgaaggctttgacgaggctattgtgcgcaaggtcattcgtctggtagatattaacgaatataaacggcgtcagtcggctgttgggccgcgcattaccgctcgtagtttcggcaaggatagacgctatccgatcacatccggctttggccgcaaaaattggtaaaacaggaattcgccatcatgaagaaaattgacgcgattattaaaccgttcaaactggatgacgtccgcgaagctttagctgaagtgggcattaccgggatgacggttaccgaagtgaaaggcttcggtcgccagaaaggccataccgagctgtaccgcggggctgagtatatggtggattttttacctaaggttaaaatcgaaattgtcgttgcggatgatatcgtggatacctgcgtagaagccattatgcaaacggctcaaaccggcaagatcggcgacggtaagatttttgtgtttgatgtcgcgcgcgtggtacgtattcgtaccggtgagcaggatgaagaagctatctaactgatactaaatcgaaaacattaaaatcaggtcgtatcatcgaaaagaaccccatttatggggttctttttttaccactaattgaatgctaatcgacgttgcgagtagcttgctgacgattgtctggcatttatccgctgtgcactgagttttccatcagaccggaacgacgaacaatccaagccaatagaacaggttaagcaagatacccgccagaatcactgcaacgacaggcgctgcaattttcattaccgggcggccaatagcttcattcaggaagtacaacgctgtggtaatagtgaaaccggtatagccagccattttgatagaagcaaaaatagcgccgatcagtaacgcatattccatcaacagattcatagcgttacggatattatccgaagcgttacgcactgaggggaagcggccaagccatttacctatagtgcgcagtaacagcacttctagcgagatcacgactgcacctaccaacgccgccaacagcgggttcggaatcaggtaaccgactacaaagacgaaggtgaaaccggctaccgcatacacgccggtcgcgagcgcagtggtggcaatcagtggcacaaagcccaagccacgcataaattcggccaatgaagcctgatgaaccagtgacagtgactcttccggcgtaatccccggcgcataggctttcgccagcgtataaatcgacacttcgctgccggcaaacagtttcatactggcgacggcggaaatcagcccaccgacgatggccaatagcggcaggttcttgattatcctctgggttcgctcctcaaatacggaatgtcctccaccaccgccgaggtgggttttggcgcgaagatcctgagcaatagctatgccgatgagcaataccatgccgacgaagatttcgatggattcagggaacaagccggtgaaacgagtgataaccaagcgggtcatcagcacgataattgctgaaattacagcagttttccagccaaactggtagaaaatagcgaccagtgggaacagcgcaaaagcagaaataactgggctgctcagttcacccaacgaaccgataaagttgactggcagagaggttaacgctgtgttgaccgcaggcagtgaagtcagcgccagaatgccccaggcggcacccagagcaaatgccagatagctgttgatcgccagcacgccgatgatgtcagtcggcaggaacagtaaccaggagttcagtaaaccggtggagagtgtaaaggaaatcccaaccgaagcgataaagccgacgctgaggccgaaagcgatactgcccgcttctctgcggctcatattaccttctaccaactgcggtaaaatcggacggataccgtcatgaaataccgcgacggagcggtgagaaagcagggcggtcatcccggttagcaaagcaaccacgatgatatgaatgtaatccacggttatccccttagcgcagctgagtgatcagcagcggaatggcgtgttcaatatgctccacggataaaccaaaggcgactttgccttcagcaatgaatttctcgatctgttccggtttggctttgatacccggtttggcaatggtcgcgcttttgttataaccaataatggctattgccatggataatgctgcaccggcaccggtattacatgcgccaatataataatccagctgcccatctttcacttttaccgctgcatccatatcggtcagaataaaagtttcaaagctggcgggcgcagttttatcgatcagttctcgtatcagctcacgttgtaacccgacgatgccgatctttttcatagtcactgtccttgcgtagagaagaatttgtttggattatggcgcagcatcatttccacctgctggtgtgaaatacctgcggccaaaagcattggaataaatgaatcaaccagataactgaaacctgtgccaccgttggcttttaaatgagaacggcgggtaatatccatcgaaagcatgactttatccaggacgccgcgctcagccagataaaccagcatggcgatgcgtcgttcatccgggaaatagctgtttttaccaatggtatcgaactggacgtacacacccttatcgatcatctgcaaaatcaaatccggctgttcttttaaatcgcagtggccgataaccacccgatccagcggcacgccatattgctccagcagcgcgatttgctgcattcccatagtgctaaagctggtatgggtcgaaatagccaaaccggtggcatggtgcgccagtgcggcggcgtgaaacacttttgcctcgttgtccgtgacacagttttcactggtaccaatctcggcgataacgccggctttcaggtcggtgccatcaatgcccacttcgatttcatcgatcatggactgcgccaattgttgcgccgagctgtcacgcaccaattgaggatagaaatgatcggtgtagtaacccgttgaagcgatgatgtttatgccactatctcgcatcagattcaataagaactgcgggttacgccccatgtatttattggtgacctcaacaatattgctaacgcctttgctcaccagctcgcgcatttcctgacatatcggctcgtattgatccaaacgacagtcgatgttgtctttaaaaccagataaatcaatatgcagatgttcgtgagcgtaggtatagccattggggttaatcattgggaaaggctccgggaaaccgatggacgcagttgagtgagaaaagattggccattttgcggcataggcgccgagaaaaacgcgcaggcggtcgcacctacgtcggataaagtaaggcgagtgcccagatcgacggcggaaagaccgagctgataaaccagcagtggcacttgttctcgggtgtgtttgccgtggccgatggttgggtcgttaccgtggtcggcaatgacaaccaggacgtcatcgggttgcattgcggcgattatctgattgagcgcactgtctaccagttgcagccggtcggcgtaacgcagggtgtcttgttgatgaccagccagatcggtttcctgaatgttggtacagataaaactgtctccgggtttgagcaattcgtcgcgcataatatcaagaatggtctgagaatcgacaatccccgcgtaattgattccattagaattacttactatatcggcaaccttaccgatcagtacagtaggaatatgtcgctgccataacatggctggagcctgcacctgttcatcgacaccataacccaaatgcgcgacgcgaaaattgtgtcgatagacaccggaatttggcgcattgataccaatatatttcccttcacgactttccgccgcccgcagcagatcggcggtatccggcaaatcgccgccaaaagcgataacgcgcccgactttaacagtttcacgaaccaattgaccgatggctagcacctgctcgaaggataatcgattgaagtcagcgctgatgttatacacctggcctaaatcggcttccagattatcgccgatcgccgcaccctgattcacccataaatagctcagattgtttaaggttatgcgttcgacctgatagccgttgccggtaagctgggatgcgacgtcatcaatcacggcggagaagggcatagaaagcggtggcagaggtaaagtgcccataatttcctgatggccaataaaggtatcgccaccttcatgttgcaataatattcgaccaaaggcggcggcgggattgggctgcattaaattcggagcgtagcctaatgagttgatcagaccgagtttttccagcgtgggtaaatataattcgggaagggtttcaagaatgtgcccgcaggtattggcaccgatatcctgcggccggacgagcgggacatccggcatttctccaataccaaaactatcaatgaccaataccatgaatttactcatggcaatctccttagttcaggctattcccctgactgtcatagcggccgattaatttcggttctccgcgttggatcccctcgaccaatgcgacgtcgctgcgtgtgacaaatatttgggtgcggaaactcattaccagcgggctgccgatcgggaatttatcgctcaaacgcaggcaataatcgatgctgctgtcatccactggcaataccttactgctgtggtaagcctggttgtgccatatcagtgcattgcttaggtggccacgacgatagtaaccgccgccgaagaagtagctggtatctccgacatgatgagagatttcggatagatacagcagcgagactttttccggctgagagccgtcttggttggctggaatagtaccggttagcgcatggcccggttcggtatgggtaacgcctaactgagccagttcgggcataacctgaatgcaggcggcagaaggcgcgttgacttgttcaacattaacgccctgtttttccagaatctctttagccgccagcagagtaaacatattggtggttggcagggttcgctgttcctgaggattaaacagcatgcaagggaaatgggtcacgccaaccagtcttaccgcaggcatattagcaatagcctgaatgacttccggcagttgattgagttcaaagccgccttcctgaccggcatagagcagatcgcctgcctggttgactttcaacatgattggctgagttttgccttgctttcgagctgcgtcagaaatttgctgcgctttctccagcgagaaaatggtgatgacttcaggttgctggctgacaatttcgtccaccatacccgacggcggctggaccaaatgcccgacgtgagccaccggaattccgtgctgatagagctgcctgacctctttaaaatccactgccaccacgccctgatagccgcatgccaacaggcgtttgcagagttcgggattacgtccgaattgcttactcatcaggtatagcttgatattgcaacgtctggcttcgtccagcaggctccgggcattggatagcgtttgatctacatcgataacgtaagtatccgggcctattttaccctgttgccacagcataatggctgtatcaatcagggttgggttctgttttcttaaggcattcaaaaacatgctgtttcctagacactttcaggcgtcattttattaatttaaattattatttttttgaatatttattatgtaatgaatcagcgttggtgtgttcttcagtgtagctgcttatctcaaaggtggtagattactggcaaggtaaaggctgtacaaattagacagcaagtaaccctgctcattatcatcaggcttaatatcaaagtaggctagcaaatcttgattaatgtctcgaatatattgaatatcttcgctttggattaattcggacaacaaatccgcatccattcccttaatcagttcgccacggcgggttcgcatcagggcgttagccatatgcgtcaccgccatttccccctgaacgttatcaatagatatctgccagaaattagctaatctattgataactttgttcattccgaggaaaacctcttcatcaattaccccagcctgatataaaatactgaggcgcggatccataatatctccggactattaattaataacgtgggtcaactttaccgagttggacatcactttggtgctgtaataattgctctgaattaatgccattctccaataatagttttattgggtgattatctggtctaatcaatatcacggcctgagaggcttgaatatagcgttcgtccccacgtagcttggttgcctgcaaattatcatgggaaacatcgtcagtcaggttccagatcgcagcgtcaatttcgccgcggctaatttgcgcgacgcagtcactgtaaggcacatcgacacgttctatattttgattggcaaacttaatttccgttaacagacattggtccggagagcgcggatccagcccgacgcggcgaatatcatgttcttcgcctcgacggcaaatcagctggtggccgtcaacgtaggaacccgtgcctaaattgagcgcaacggtaaccttaccctgatcaacataattctgtgccgccaaacgcgaaactaccgccatatcgtagatgccgtcgatcaaacactcgactcgcacttctgcaccacgcatatgggcaaaatacagcggcaaaatggtaaattgttcctttaatccgctggctagcccttcgtacagcttggtatagggcagcggcattgcgcagaccatattacccaaatctgcctgttgtagcaggcatgacatattgagatccataagctgcgttccgttgcggccacggcgctctacgacaatagcgccttcttgttccaataccttcaaggcgtgttgtaccacgcctacggaaatcgcgaaattatccgataactcgtcgatggttttcagtcgatttcctgggcgttcgccaattaaatagcgcgccatggataccagagccaacccttctttttttatgaattttctactcatgctgggtgtatttagccttatgttatctaggtgcagatagtgactttaatactattgattacaatgatattaattttcaattatatgaatatttaaacattcatataaataatagatgtttgcaacgataaaagcgagcgggggcgttattgatcacaatataagagcaataattatcttaggaaagtacagattcaatacaataaaaaaccggccaacaatacagactgaccgggaaagaaacgcagaaaaacttatcaattaaataactttgtgaggtccgaagcattcatagtgaatatgttctgccgggacacccatttccagtaattgtttaccaacaaactgcatgaagaccagagggccgcagaagtagtaatgcatatcgggatgaataattaatgactgcaactcagccagattcataaagcctttactatggtaatgctggccagggatatcctgctcttccggctggcgataccaaacgtggcgattcagattcggcatatttttcgctatttcagcgacttcatcggcaaaggcatgaacccggccattttccgccgcatggaaccagtgcacttcggcgctatgttgttgagcgtacagcgtatgcaacatgctcaacattggcgtttggcccacgccggcagaaatcagcgctaccggggtttccggtgaaatatcaaggaagaaatcgccgcgcggtggcgcaatgcgcacgatgtcgccttcctgcgcgatgttatgcaagtagttggataccgtccctttttcttcgcgttttaccgcaatacggtaggatttaccgttaggcgcagcggtcagggaatattggcgaatttgacggttttctaaccggctatcttcgatataaatacccaaatattgacctggtttgaaattcactacgctgccgccgtcctccggcactagcaagaagctgcagataacgtcgctttgcatttcttttttcgcaatgcggaaacgacgcagggttctccagccgccggtattttcttccacttcacgataaatttgctcttcgcgttgaataaacacgtctgccagcacaccgtaagctttggcccaagcatccaacacttcctgacccgggctgaataattcatccagcgtcgcaattaaatgtttgcctacgatttgataatcagacggctgaatattcaagctggtgtgtttttgagcaatacgttcaaccgcaggcagcatagccgaaagattttcaatgttggccgcgtaggcgcagatagcattaaacaaagcttcgcgctgatcgccgctgaactgattgctcatattaaaggtatctttcagctcagggttatgagcaaacatacgatcgtaaaaatgcgcagtgagcttcgaaccggtttcaaccagcaaaggaatggttgattttacggtggcgatggtttggctatccagcatggtgaggctcctataatttttcgaataataatgtgcaaattaatacatgtattttaaatgcatcttataaaaaacaacacggcttgtaaatacacattcattaatgagggcgattatcgttacgcgccagttcacacttatgaaaaaaccgcatactcaacatgaggataaatccgttgatttgtgtgaactcagagcagtgcaaagcctcatgtggcttgaagccaatcgtttgcgtaaaaacctctgtcaagacctatcttaacgaggtgaaaacagtttacactgtgggccagaacccaaacgggtggtccactaggtgtatttagttagctgagtcaggagagccggatgttaaagcgtgaaatgaacattgccgattatgatgcagatctatggcgtgcaatggagcaagaagtggtgcgccaggaagagcacatcgagctgattgcgtctgagaactataccagcccgcgtgttatgcaggcgcagggttcccagttgacgaacaaatatgctgaaggttatccgggcaagcgttactacggtggctgtgagtatgtcgatgtggttgagcaactggctatcgaccgcgcgaaagagctgtttggcgcagattatgccaacgttcagccgcactcaggctcacaggctaacgttgcggtttattccgcgctgctgaagcccggcgataccgtattgggtatgaatctggcccatggcggccacctgactcacggctccccggtaaacttctccggtaaactgtacaacatcgttccttacggcatcgatgaatctggcaagatcgactatgacgacatggcgcgtcaggctgaactgcataaaccaaaaatgatcatcggcggcttctctgcctattccggtatcgttgattgggcaaaaatgcgtgaaatcgctgatagcatcggcgcgtggctgtttgtagatatggctcacgtggcaggtctggttgctgcgggcgtttaccctaacccggttcctcacgcgcacatcgtcaccacgaccactcacaaaactctggctggcccacgcggcggtctgattttggcgaaaggcggcgacgaagaactgtataagaaactgaattcttccgtattccctgcaaatcagggtggcccgttgatgcacgttatcgccggtaaagccgtagcgctgaaagaagcaatggagcctgaattcaaggtttaccagcagcaggttgccaaaaacgcgaaagcgatggtttctgtcttcctggatcgcggctacaaagtggtttctggcggtactgaaaaccaccttttcctgctggatttggtggacaaagatatcaccggtaaagatgcggatgccgctttgggtcgtgccaatatcaccgtgaacaaaaacagcgtgcctaacgatcctaagagcccgtttgtgacttccggcgtgcgtattggttccccggctatcacgcgtcgcggtttcaaagaagcggaatccatcgagctggctggctggatgtgtgatgtgttggataacatcaacgacgaagcgactatcgaacgtactaaacagaaagttctggaaatttgcgcccgtttcccggtttatgcataatttctgcgagtttatatagttgttatcaaacccgcttcggcgggttttttttcatcaaatatccggtaatgaataaagcggaaacgccagataaaagagaatttcttcactcgtgatgtgaggtagcttgcaaactatttgtttggatgattacccggttgctagcgaagaagggctctgtcacagtatctggctgactccggaggaattatggtattgcaatcaacgcgctggctggcgctcagttatttcacctacttcttttcttacggtattttcctgcctttttggagtgtgtggttacaaggcgaaggtattccgccggaaaccatcggtatcttgttaggcgctggtctggtttctcgtttcctcggcagtttaattattgcccctagcgtgaaaaacccctcccatctggttactgcactaagaattctggctttgctgacgctggcatttgccatcggtttttggtttggcagtggctgggcgtggctgatgatagtcattgccggttttaacctgtttttcggcccgctggttcctttgaccgatgcgctggctgcgacctggcaaaaacagatctcaatggattatggcaaggtgcgtctgtggggatcgctggcgtttgtcattggttcagcgttgaccggcaaactggtatctgtttggggacataacgcgattctttacagcctgaccgtcgcggtagcggcgatgctgctgggcgtcttattacgcccaaatgtaatgcctaaaggcgagattcgtagcaatgtattaccggcgaccaagtggaaaattttactgtctgaagggccggtctggcgatttttgctgtgcgtgacgctgctgcaaggcgctcatgcgggttactacagctttagcgcaatttactggaaagaagccggttattcggcggcgactatcggttatctgtggtcgctgggcgtggtggccgagattttggtcttcgctttcagtaatgtgctattccgccgctggacggcgcgcggcctgctgctgctttccgctatcagcgggataattcgctggagtctgatggcatcgactaccgagctgcactggctgttgctgattcagattttgcactgcggctcctttaccgtttgccacctggcagcaatgcgctttatcgccgctcgccgtggcgcggatgttattcgtctgcaatccgtttactctggcttggcgatgggaggagggattgcggtgatgacggtgatttccggcttcctgttcgaacatattcagggcggtgtattctgggtgatggcgctggtggctgtaccggctctatttattcggccagcagtggtagcgaatccagaagacctggcggattaaggcgtttccagccaacgacgaatagcgatctgatctgcttttgttaacggtaaaagcacctgaattaacggcggcgttgactcgggtgtttctcgtttatagggagaaatcactagattggcaccgggcggtgcgccagattttaggtattcagaataagataagtatttgatatagagtggtagtagcgttagctcacgcagttgctgttctactcggtgctccaactccgggttcccgttggtcagtagtaaaatctgtttttcttgtaacgcattgccctgcatcagccatgcaccaaagctaatggcaatcagccctagctcatcggccgaaaattcaatctggtattcccgttcaaaatcgattaaagcttcgcgagtcgtccgtaacaagcggggatatttgctgctgatttcatccagtaaaatattatccacaccaatatgaaagcggcagcgctcgattgccggagccaaatgagcaaatagctggctgattaactcatcgtcactgctgaattccattccggaaatctgttgaaaacgtccaatcaatcgatgaatggaatccatcaggcgaacatcttccggagaatggttgctgctgtagctatgcgctttaatcatggtcaacgtcaggataaacacatccctttcgctgctggctaaggggcgggaaagctgattattcagtgtgcaaaacaggctctcggcggcggtcagttctaccttttggctcaaccacgtcacctgctgctgctctaactgcgggtagttttgttgctgattttcccaaaccgcgtaggccagataaatctgcaaaaaatagcggtcacgttcgtccagcgggcgaggtagaagctgttcacattgttccacgatatcttgtagcggcggtaatacggcattttcactttgccattgcagcgcctgatgtaacgctggcacaaagtttttatcgataaactcgggacaatagcgtagccctcggcgtagccaatgaatcagacacagccgtttatttagtaacgttccttgtagttggcagtcctcagccggattggtacgaatatccaggtgatagaaacgctggatttcgttcgccacctcagctatatcttgccgggtggtcggaagcccgacgccatttaattgactgatagtctccagttttaccggcaatgtcggagtaaacagcagcaataacgcatgacaacggcgctgttgaccggagagctcaggcactggtgtagtgtctaggctcataaaaccttccgaagtaagtttgattggtattatcacgctaagcatagcaaaagtgggaaaaccagcgcgctcgccgcaatagcttttacatcgggttacaacttacatcacaataattgctgtaaatccaagggttgatagatgttcaatgtgttatgttataacaattatgcgtcgtacaaatatatttggggactatttattggcgtggcagttttactgtatagcccctcagggctagcgcatccgcacagttttatcgagatggaaaccacttttgtggtggatgaccagaaactgaccggtatgaaaatggtctggacgatggatgaaattacctccgccgatctactttatgacgcagaaaatgccaaaagtgactcggaaatctggaagaaactggcggcggaagtcatggctaacgtcttggggcagcactatttcaccgatatttaccgcgatggaaagccggtgaaatacctgaatttaccgacggaataccatttgtcccgcaaaggacatcgggcggtattggcattcgtgatgcctttagccgatccgcagccgatggtcggtaagccttttataatttcgacttacgatccaacgtattttgtcgacatgacttacccggatcaggccgcaattcatttaccagatgaatggactaagcgttgtcaggccactttatttaccccaaatccggacgcatcgttacaggcctacgccttgtcgctagataaggaagactcccctggggaagatatggctttaggaaaacaatttgcccaacggataactctacaatgtcagtaagttttaccccggcaacccgccgtcagaaacactggttcgttcatctttggcctttggcattgttcctgttgtgtttggcgctggcggcgcaattggcttggtcgtactggcctgagttgctgtttaaaagcgtggtatggcaaaaaaccatgcaccagcaaatggcgcagctactgcaacaggtaaaagcaaatccgcatcaaacgggattggggctgatgtttttcagcctgatttatggtgtgttgcatgcggttggccccggtcacggaaaagtggtgattgtcacttatctggctacgcatcccgcgcggctgaaaagtagcctgaaactgacttttctagcctcgctattacagggcggagtggcaatagctttggtctcgctgatattaggcgtgttccaattatcctcccgttatttgcatcaaagcagctactggatggaaaagggcagctttttactggttatcctgttgggattgttactgtgtttccgcgcattaaagcggctttatcaccaaatcactctactcaagccgaagaaaatcactatccagcgtctgcaacctttaccggccgatcatgtacatagtgaaaactgcggctgcgggcatcgtcatcttcccagcgatgaggaattgcaggcgggtaacgattggcgaacccgtttggcggtgatactggcgatgggaatgcgaccctgttccggggcgattatggttttgctgtttgccaaagtcatcggggtatatgtttggggaatagcgtcggcgctggcaatggcgctaggaacttcactaaccatttcgctgctggcgctgtttgttcactacgcccgtcagttagcggtacgtttgagtcgggatcgcgcaccggcggcgtggggctccctcgcctgggccactttagcattggccggaggaatcattttactcttcgcgggagtattgctttatctttccagtcagccgtccatgatgggaggcgttcgtccatttggccgctgaatttcaaccataaaaaatgccagtcagcgtcaaccgactggcattgcaattcggactggaggctgaaaattaacgcttcagcgcttcactcaattcatcgttcattgcctgcaacatagatttcactacgcgcggattaccggcaacaatgttaccagagctgaaatggttatggccgccaacgaagtcggtcacgataccacccgcttcacgaaccagcagttcgccaccagcgaaatcccaaggcttcaggccaatttcgaagaaaccgtctacgcggccagcggcaacgtaagccagatccagcgcggcagaacccgtgcgacgaatatcagcacattgggtaaacagcttacctaacacattaatgtaggccggtgcgtgttgtttcactttgaacgggaaaccggtagccagaatagtgccatccagctctttcgcgttagtaccgcgcaggcggtaaccgttcagctgagcgccttgaccgcgagttgcggtgaacagttcattacgcattggatcgtaaaccactgccacttcagtgcggcctttgatgcgtacagcaatggaaacagcgaaatgtgggaaacgtttgatgaagtttgaggtgccatccagtggatcgataacccattgagtttcgtactcttcaccaagtaattcaccacattcttcactgataatggtgtgttttggataagatttacggataacgtcaatgatcagatgttctgcatcacggtcaacgttagtaacaaagtcattactgcctttctggctcgcttcgacagcgtccggggtttcataatttttggcaatcaggttaccggccttacgcgcagcgcgtatggcgatagtcagcatcggatgcatgggtatcttccaactaggatgttaaagaacgagaaacggcgcgtagtatagcaggggatctgataaatgcctacgcttgtgttaagatgttgcgattccccgctaccctcagagtttgtatgttgcacaatattcgcattgttttggttgaaacttctcacaccggaaacatgggctctactgccagagccatgaaaaccatgggattaactaatttgtatttggtcaatccattggtaaaacctgattctcaggccatcgcgctgtctgcgggtgccagcgatgttatcggcaatgccaccatcgttgacacgctagatgaggctctggccggttgcagcctggtcgttggcactagtgctcgctctcgcacgttgccgtggccgatgctagaaccgcgcgaatgcggcgttcgcagcgcacgtgaagccgaacatgcaccagtggcgctggtgtttggccgtgaacgcgtggggctgactaacgatgaactacagaaatgtcattaccacgtggcgatcccggcaaatccagaatacagctcgctgaatctggcgatggccgtgcagattctggcttatgaagttcgagtggcattcctcgatcgtcaggcagaaatcgcacctaagcaggaagaggaagaagcgccttatccactggtagacgacctggagcgtttttaccagcatctggagcaggttttatcccacaccggctttattcgtcaggcacatccggggcagattatgagcaaattacgccgtctgtttacccgcgccagaccggaaacacaagagcttaatatcctacgtggaatgctgacttcgatcgaaaaacaggataaacatcagaaaagtgccaataacgccaaaatggcgaaagataaagaatagtcatatatatcatgttgatatatgactgtttggcacaaatatataaggatgacgaggcataaaatacttgagtgaattactaggttaaatagttgactaaaacactcaagaatggcagacttctagctcgtttcaccaacaggtaattttaagctatgagactgacatccaaaggtcgttatgccgtgaccgccatgcttgacgtggcattacattcccaggacgggccagtacctctggcagatatttctgaacgtcaaggaatctcgttatcttatctggaacaactcttttcacgtctgcgcaagaatggcctggttgccagcgtacgtggtccgggcggcggttacctgctgggtaaagacgctggccagatcgccgtaggcgcggtcattactgccgtagacgaatctgtcgatgcaacccgttgtcagggtaaagaaggctgccagggtggcgatcgttgcctgacccatacgctgtggcgcgatttgagcgagcgtatcagcagcttcctgaacaacattacattggcggaactggttaataatcaagatattttggaagtagcggatcgtcagaacaacgatacgcgtcgtacggccaacggccgaccgcaagagacgattaacgtcaatctgcgcgcataagcagagtctgcgggatcttcagtttttggaagtgatgtacggagcataagagcaatgaccgaatcaaaagtaaaaacgccgatctatctggattattcagccacaacgccagttgatccgcgtgttgctgaaaagatgatgcagtatttgactttggacggtatcttcggcaacccggcctcccgctcccaccgttttgggtggcaggcagaggaagccgttgatatcgcacgtaacgacatcgccgcgctagtcggtgctgacccacgtgaaattgtgttcacttcgggtgcgacagaatcaaacaaccttgctattaaaggtgccgccaacttctatcagaagaaaggcaagcacatcatcacctgtaaaaccgaacataaagctgtgctggatacctgccgtcagttggagcgtgaaggtttcgaagtgacctacctggcaccgcaaagcaacggtattatcgatctcaaacagcttgaagctgcgatgcgtgaggacaccattttggtttccatcatgcatgtgaataatgaaatcggtgtggtgcaggatatagctgctattggtgaaatgtgccgtagccgcgggatcattttccacgtcgatgcgactcaaagcgtaggcaaactgcctatcgatctgagcaaactgaaagtggatctgatgtccttctctgcccataaaatctatggtccgatgggcattggcgcactgtttgttcgccgtaaaccgcgtattcgtattgaagcacagcagcacggcggcggtcacgagcgcggtatgcgttccggcactttgcctgtgcaccaaattgttggcatgggtgaagcttaccgtattgccaaagaagagatggaaagcgaatctaagcgtttatcctcactgcgtaagcgtctgtgggatggcctgaaagatatcgaagaagtttacctgaacggcgatttagagaatggcgcacctaacattcttaacgtcagcttcaactacgttgaaggtgaatcgctgattatggcgctgaaagacttggccgtttcttcaggttcagcctgtacctccgcaagtctggaaccttcttacgtgctacgcgcgctgggcatgagcgatgagctggcacacagttccatccgtttctccctgggccgttttaccactgaagaagagatcgactacaccattgcgctggttcgcaaatccatcggtcgcctgcgtgaactgtctccactgtgggacatgttcaagcagggcgtggatatcaacagcatcgaatggtcacatcactaattccagactttcagattcaggagcactcaaatggcttatagcgaaaaagtaatagatcattacgaaaacccacgtaacgttggttctttcgataacgaagatccaaccgttggtagcggcatggtcggcgcgccggcctgtggtgatgtgatgaaattgcagatcaaagttaacgaagccgggattatcgaagacgcccgctttaaaacttacggctgcggttccgccattgcttccagctcgctggtgaccgaatggatgaaaggcaagtctctcgatcaggctgaagcgatcaaaaacacgcaaatcgctgaagaactggagttaccgccggttaaaatccactgctcaattctggctgaagatgccattaaagcagcgatcgccgactacaaaagcaaacataacgctaagtagttgtaaatcagtataaataacctgtctgtggttagggcaggttctcagaaatgaggttgttgtatgtcgatatctatcagcgacagtgctgcgcaacgtgtcagcgccttcttggaacaccgtggtaaaggtttgggtttgcgcctgggcgtaagaacctccggctgctccggtatggcgtatgtactagaatttgttgacgaaatgaacgatgacgatatcgtttttgaagacaaaggcgtgaaagtgatcatcgacggtaaaagcatggtctatctggacggtaccgaactggatttcgtcaaagaagggctgaacgaaggctttaagttcaacaatccaaacgtttccggtgaatgcggatgcggtgaaagttttaacgtttaatcgttagtttttgccttatatcgtagcgctatactgacgtttgctgatttatctggctctcttccatgccgctgaggcgggaagggagctgcataaacccctcactcagccacacgacaacttccgagcatgctatggattacttcactttattcgggctgccggctcgctatctcgtagacgccagccaactcacttcccgctatcaggaattgcaacgccagttccatccggatcgctttgccagccagccagaacgcgagcgtttgctggctttgcagcaggctgcgacgatcaatgacgcctatcaaaccctcaagcatccgttaaaacgcgcagagtatatgttatctttgcagggttttgatttgagcaatgaacagcacaccctgcgtgataccgcgtttctgatggaacaattggaactgcgggaagagcttgatgccattgaacgtcaggccgatgccgaaagcgcattagcggcttttaacgcgcgtttggcggtaatgacacaaaaacgtagcgagcaaatggtgcaggaactggataaccagcaatggatcaatgcggcggatactgtgcgaaaattacgttttctggacaagttacagcagcaggttgagcagttggaagaacgtctgtttgacgattttgcctaagagtcaggccgcggttagcaggcttgtgccctgaactgttaatctcatgcttatgatagtgaacgaccaaacgtatcttttaaagaatccctgaataggctgaacatgcctaaaaaagcagggcgttggcgtttcgcttgagaaatttttgtcatttatacccaatagattacccgctgtcgttttaccctgcggcagcctgcaagttaaagggtatagattcatgattgatggaagctcaacatggccttattacaaattagtgagcctggtttaaccgcggcgccgcaccaacgtcggctggccgcaggtatcgatttaggtactaccaattccctggttgctacggtgcgcagcggtaaagcgcaaaccctggcggatagtcagaaccgagatttgttaccctccgtggtgcactatcagcgcgaaggcattgatatcggttgggaggcacgtcagcaggcggcgcaggacccagccaataccatcagttccgtcaaacgaatgatgggacgttcgctagcggatattcagcagcgttatcctaatctgccttactccttccagccgagtgaaaacggcctgccgatgatccaaactgcggtggggctggtcaatccggttcaggtctcagccgatatcctcaaggctttgtcgcagcgtgcgcaggaggccttagaaggccagctcgacggtgttgttatcaccgtaccagcctattttgatgatgcgcaacgtcaaggtacgaaagatgcggcgcgtctcgcaggtttacacgttttacgcttgcttaacgaacctaccgcagcggcgattgcctacggtttggattccggtcaggaaggtgtgattgcggtttacgatctgggtggtggaacctttgatatttctattctgcgcctgagtcgtggggtatttgaagtgctggcaaccggcggggattctgcgctgggcggcgatgactttgatcatctgttggctgactggttacgtgagcaggctggaatttcctcccgcgacgatcacggtgtgcagcggcaattgctggatgcggcgattacggcgaaaattgctctgagtgatgctgacgtagcggaagtgagcgtagcaggctggaaaggggaaattacccgtcaacagtttgaagcgctgattgctacgctagttaaacgcacgttaatggcttgccgtcgtactctaaaagacgccggtgtcagcgctcatgaagtgctggaagtggtgatggtcggcggctcaacgcgcgtgcctttggttcgcgagcaggttgggcagttcttcggtcgcacgccgctgacgtccatcgatcccgataaagtagtcgccatcggcgcagctattcaggctgatattctggtgggcaataaaccagacagcgatatgctgctgttggatgttattccgctgtcgctggggttggaaaccatgggcggtttggtggaaaaagtgattccacgtaataccaccattccggttgctcgggcgcaggaattcaccacctttaaagacggccaaagcgcaatgatgattcacgtgctgcaaggtgagcgagagctggtacaggattgtcgttcgctggctcgatttactctgcgtggcttaccgccgctgccggccggcggcgcgcacattcgcgtgacttttcaggttgatgccgatggtttgctaagcgtgacggcgatggaaaaatccaccggcgtagaagcttcaattcaggttaagccgtcctatgggttatctgatgacgaaattgccacgatgatcaaagattccatggcgaacgcgaagcaagacattaatgcgagaaaactggcggaacaacaagtcgatgcatcacgggtgctggaaagtttgcagggcgcactggcggaagatgccgcattgctgagcgaacaggaaagcgcggcgattgcgcaggccgtggaagtcttgcagcaaagcaggcagggcagcgacccggcggcgattgaagccgcaatcaaatcgttagatgcacaaacgcaaaactttgccgcgcgtcggatggatgcctctatccgtcgtgctttggctggccattctgtggatgaggtttaatcatgcctaaaatagtatttcttccgaataaagaccattgtccggatggtgccgtatttgaagcgcgtcaaggtgaaacaattttggacgttgctctgcgtaacggaattgatatcgagcacgcctgtgaaatgtcctgcgcctgtactacctgccattgcgtagtgcgtgagggctttgattccctgaatgaaagcaccgaactggaagacgacatgctggataaagcctggggactggagccggaaagtcgtctgagctgtcaggctcgagtggctgatgaagatctggtggttgaaattcctcgctacaccgtcaaccacgctcgcgagcactaatggatattattcgtcgatccgctttgggcggcggcggataaaggagaaacgaatgagtttaacatggcaagacacgcgggaaatcggtgaagcgctgtacgatcagtttcccgatctcgatcccaaaacggtgcgttttaccgatatgcatcagtggatttgcgatctggaagagtttgatgacgatccggcgcgatcaaatgaaaaagtgctggaagcgatcttactagtctggttagatgagttcgagtaaatatctctggggtcgcgttggcggccccgtttctttttgataaaactgtttcctataaaaattttctataaatcttttcgtatcaatcgctttgtattcgaggctggtttcgcagaccagtaactaagtagctgaaatacagcaataaaagaataacgacgaggaaagctatgactacagaaattatgcaagtatccctatcaaccaatccggcagatgcccgctggggcgagaaagccctgttaagtaccaacgatcaaggtatgactattcacctaacgggcaaagatgctctgggtgtgattcagcgtgcagcgcgtaaaatcgacggacaaggtattaaaaaagtgaagctggccggtgaaggctggggtttggaacaaagctgggcgttttggcagggtttccgtgggccaaaaggtgagcgcagcgttgaatgggcagaattgccagagaacgatcgtcaggagctggaacagcgtctgaaaattattgattgggtacgtcacaccatcaatacccctgcggaagatctagggccgaaacagctggctaaaaacgccatcgatctgatgtgcagcgtagcctgtgatgctgtcagctaccgcattaccgaaggcgacgatttacgagagcaaaactatgctggtattcataccgtaggccgtggttccgatcgttctccggtactgctggcgttggattttaacccaaccggtaaccctgatgcgccggttatggcttgtctggtcggtaaagggattactttcgattccggcggttatagcctaaaacaaagcgcctttatggattcgatgaagtccgatatgggcggcgcagcgactctgaccggcgctctggcattagcggcagctcgcggtttgaaccagcgtgtaaaactgtatctgtgctgtgcggataacatggtgagcggcaatgcctttaagctgggcgatattattcgctaccgtaatggcaaaaccgttgaaatcatgaataccgatgccgaagggcgtttggtattggccgatggtctgatcgatgcatcggagcaaaatgcgtcgctgattatcgatgcagcgactctgaccggcgcggcgaaaaccgctctgggtaatgattatcacgctttgttcagcttcgatgatgaattggcgcaggaactgctggaaagtgcgaaaagtgaaaatgaaccgttctggcgcttaccgctggccgaattccatcgcaaccagctgccgtccaactttgccgaattgaacaacgttgccgcgccgtcttatccggccggtgctagcacggcggcgggcttcctgtcccacttcgtgaaaaattatcagcaaggctggcttcacatcgattgctccgccacttatcgtaaaggtgcagtggatcaatggtccgctggcgcaaccggtctgggtgtgcgcaccgtagctaacctgctgctggcgaaagccaaatcataggtcgcagctgaagcagttttaccaagtctgtttgaataatctggggcgcctgctggtgcccctttatcgatctgcatgattcctaattgattgctgttttggagtatgaaatgagttttccgcatcttccctcatctgatcatgactatagccatgaccatgaagaaaataccggtgaaaatgagctggagaagctattaaaactggcggcaagtgagtctattcaccgaccggcctttttccgtgccttactcgatgccaccgttttggtattgggcgattccgggcaggaaagtcaggacggtgaaatgactttctccgccggtaatggggtgaatattctgcattgggaaaaacagggcggcgaattgaccattccttttttttcttcgctggaaactttgcagcaagcgatcagtcaatctgaaggcgaaaaagagcagccttttgtggcgatgccggtacgcgtgctgtttgaaatgacgcagggagccagcctgtttttgaacccgaaaactgaatatggcaaagaattctatccggaagaagtggctatgctattggccaacggtggtgtagctaaaccaacggaaatggtggtggataaagaaacgcagattctgcttggacaaccagaagaatatccgtcggtgattgttgatgcgttaaccaaactattcagccagcgcaagccggtgcgccgagcatttctggcgttaatgcatgataaaagcgtggatgagaaaccgaatttgctgatcgggctggaagtggatggttcagaagaagaaattgaaattctgattcaggaagccggtcatattgccagcgagcacgcgccagacgatagcccggttgatttttgcgtggtatcggaaaaagaacgaggcgttagccattatttgactacgcatacgcagcctttctaccaacggaaatggggcagttggctgcgaaatagcattccttcatcagggcaggcgtaatttatactggacggaagccgctgagtttccgtcctattcttcgtatttatcattacttcgaaacgatttcttcaacttttccttcactctttgtcctcaagtgactaaatcccgtaaacatccctttccttttttaactttaataagataatagcgcctatgtgcgatggcttattcgctctctcagccagggaaaaacagaatgaatccataccctaagaaggtatttcagtcaggcaagaaaatttgtcagggaatgatgttggccggcgcggtattactgatggcggcctgtgatgagggcgataaaacatccgccgtcgccaatgccaaacagactaacgcggctgccgttgtacccgctgccgccaaaaaaaccgatgccgcctcgctggcggaaatggccaagcgttttgccggtaagcctttgacactgcttgatgcttcagagcttcagctagacggtgccagcggaatggtattgaccttctccgttcctctcgatcccaatcaggattttggtgcgcaggtgcatttggtcgatacccaaagcgggaaaatcgacggtgcctgggagctgtcagacaatctgaccgagttgcgtttacggcatttactgccggaacgtaaactgctgctaacgctggacgctggcctaaaaggcattagcggccaaacgttaaccgtaccggaaccgcaaaaaatcaccactcgtagcattaaaccgagcgtaggttttgccagcaaaggttcgcttttgccaaccaaattggcgcagggcttaccggtaatggcgctgaatgtcgatcacgttgacgttaactttttccgcatcaaaccggccaatctggctaatttcatcgcgacctggcagtaccgaaattcattcggtacctgggaatctgatgaactgctgaaaatggccgatctggtgtataccggccgtttcgatcttaatccacagcgtaatacgcgagaaaaaatcctgctgccgctaggagatatcaagccgttgcaggaaaccggcgtttatctggcggtgatgcaacaggcgggacagtacagctatagcatcgcggccagcatgtttacgctaagcgacattggcgtttcggtacatagctatcgcgatcgtctggacgtcttcgctcaagggttagaggggggggccgcgctgaaagacgttgccctacagctattggatgaaaaagggcaggtgctggcagaagggaaaaccgatgctcagggccacgcccagttagaaaaaaatgccaaagggaaactgctactggcgagcaaagatgggcaaaccagcctgatcgatttggtggctccggcgctggatctggccgaatttgaaatcgctgggccggaaggttatcaaaaacaattctttgcctttggtccgcgcgatctttaccgaccgggtgaaaccttgattgttaacggtttactgcgggatgccgacgggaagcctctcgccgctcagccagttaaagtcgacatcgtcaagccggataatcaggtggcccgcagctttgtctggcagccacaggacggcttataccaataccaatatgcgattccggatagtgcgctgaccggggattgggcgctgcgctttgatttgggcgacaaccagccgcgtttatataaattcaaagtggaagatttcctgccggaacgcatggcgctggatatttccaccagtaaacagccgttgagcaccgatgccgcgttggcctttgacgtgaccggccgttatctgtacggcgcaccggcggcggataaccgtttgcaaggacaggcatttttgcgtccgcagcgagaggcgctaaccgcactgcccggctttgaatttggttcagtggcggaagagaatctttcccgaactttggatgaatttgataccgcattggataaaaacggcgaactggccgtgcaaatcgataacagttggagcggcgttaaatctccggtgaaagtgattttacaggcgagtttgctggaatccggcggtcgtccggtaacccgtcgcgctgagcaggctatttggcctgcaaaagaattggcggggattcgtccattattcagcaagcgaaacgtttatgactatgtttccgataaatatcgttcgcaagcgatggtggatgtcgatagtcaggccgagtttgaggtggtttatgccaacgcagccggagagaaactggcggcaaaaggcctgaaagttcgtttgatccgtgaacgccgtgattactactggcagtggtcggaaagcgacggctggatgtcgcaatacgataaaaaagacctgatgctggacgaaaaaaatcttgatatcgccgcaggcagcagcggcaaagtcagcttcccggtggagtggggggcttatcgggttgaagtgagcaatagccacaacgatttggtgagtagcactcgtttctgggccggttacgattggcaggacaataccggtggcagcggctcggtgcgtccggatcaggtaaaactgaagctggataaaccggcttatcgtccgggtgaaaaagtgaaattacatgtggaagcgccagcggccggtaccggttatttgctggtggagtccagcgacggcccactgtggtggcaggaagttgcggtgccagtcggcggtgctgacgttgaggtgccattgaataaggattggaaccgacatgatttgtatctgagcgccacggttattcgtccgggtgataaaacggtgcaatccacgcctaaacgtgcggtaggtattctgcatctgcctttggcagatgaagggcgcaagctaggtctgacgctggatgcaccggcgcggatgcgtccgaatgagacactgacggtcaaagtcaaagctaacccaatagacggtaagctgccgaagaaagtgcaggtgctgttgtccgccgtggatagcggaattctcagcattactgattttgcgacgccagatccttacgatgctttctttgggcgtaaacgttatagcgtcgatcaatatgatgtatacggccaattgattgaaggtcaggggcgtttgggtagcctgcgttttggtggggacggcgatgaggaagacgctctgtctcgcggcggtaaaaaaccgataaccgaagtgaccattgtggctcagcaggcgcagccggtgacgctgaatgaacaaggtgaaggctctattcagttagctattccggatttcaacggcgaattgcgtttgatggctcaggcatggagcgatgaagattttggtaaagccgaaagtaaagtgatcgttgccgcaccgctgatcgcgcagttagccgcgccgcgcttcctggcgggtggagaccataccgaactggcgctggacttaagcaacctgtccggtcatccacaaaatttacaggtgaaactcagcgccactggtctgatcgcgttaaacggcgcaggggaacagcagctttctctggccaacggcgaacgtaaaactctgctgattccggtgcaggctctgaacggtttcggtcagggggatattggtttggttatcagcggcgttgccctgccaaatgaaaatctaccggattatcaacatcactggaaaattggcgtgcgaccggcttatccggcacagactcgccatttcgccaatattctgcacagcggcgaaagctggatactaccgccagaggccactgaaggtctggaacaagatacccttgaaggccagttgttgttaaccagccgaccgccgttaaacgtggcgcgctacatcagcgagctgtatgcctacccttatggctgtctggagcaaaccgttagcggcctgtatccgtcgctgtacagcaattatgcccagttaacttccattggcattaaagccgatagcgatgaaaaacgccgtaaatccatcgataccggcatcgaacatctgctgagtatgcaaaaggataacggtggatttgcgctgtgggacaaacagggttgggaagaacattggctgacggcctatgccaccgatttcctgttccgagctagccagcagggttacagcgtgccagccagcgcgctgacggcggccaataatcgtttactgcgttatttgcaggatccaagccaaattgagatgcgctacagctccaatgatctgcattcacgctttgcggtacaagcttacgctgggctggttttagcttcgcagcagaaagcgcctctgggtgcgctacgtcagttggccaaccgcagtaaagacgcccgcaccggcttaccattggtgcaattgggtatcgcgctgaaaatgatgggtgatatgcctcgagccgaagtcctgctgacgcaggggatgacgacgacacgcgctaaaaccgattattggttgggagattacggcagtgaaattcgtgacaatgctttgattctctcattgttaacggaaaacaacctattgccgcagcagcgtgatagccggttgctgtcgttgtctgagcaactcactggaaagcgttatttatcgacgcaggaaagcaacgcggtatatctggccggacgcactttaattagcgccaatgaaacgccgtggcagatcgctttcgcgacaaatcacgcggaaggggcggcagaaactcatgacaaaccgcttagccagaattggtctgctaagcagctgaccgaaggtttggcgctacagaatccggggagcgcggcagtttatagccgattagatttagtaggttatccgcagatggcaccaacgccttctaacaataatctaagtatcacacgtacttatctggatatgaacggtcatccggtggaattggatcaggttaaaagcggccagttaatcgtggtttacctgagagtgggcgctaaccaacgggtgcctgatgcgctggtggtcgatttactgcctgccgggttggaactggaaaaccagaatctgggtgacagcagcgccagcttgggggaaagcgccagcgggttgccggagctacagatgaatatgcagcaggcgaccattaaacatcaggaattccgtgacgatcgctatgttgcagccgttgatgtcgatggctacaacttcaccacgctgctgtatctggccagagcggtcacaccgggtacctacctgattccaccgccgcaggtggaatccatgtacgtaccggaatggcgtgctgtgggttcaacgccaacgcagctacgcgtactgaaataaactttctggcctctttgttgcggattatctgtgcaaaggggccgaaatcatcgcctgatgactcgttttttccgctctcgccgccgtttctggcttgctttgctgtttatctcgctgctgctgccggcggctatctggctggctgatagagcctggccgctgcctctaactgatgtacaaatggcacggattgtggtggcggaagatggctctcccctatggcgttttgcagatgatgacggcgtctggcgctatccggtcagtatcaaacaggtttctccgtattatttgcaagcgttgctaacctatgaagatcgctggttctatcatcatcccggtgttaatccattatctctggcgcgtgcggcctggcaggatctccgtgcggggaaaatactctccggcggcagtacgctttccatgcaggttgcgcgcctgatcgatccacatcctcgcactttaggtggaaaactgcgtcaggtctggcgcacctttcagttggaatggcatctgtccaaagaccagattttggagatttacctgaaccgcgcgccttttggcgggacattgcagggcatcggtgccgccagttggacttatttaggcaaagcgccggacaacttgacccaaggggaagcggctttgctggcggtactgccgcaggcaccgagccatttgcggcccgatcgttaccctttacgtgccaaagcggcgcgagacaaagtattaacccgattggcgcagtacggcgtctggcctacgagtcaggtgactgaaattcaacaggaagatatctggctggctcctcgtcaggtgccgcaactggcacctctgctggctcgccgtctgactctcggtaaccagcgcgaacttattcaaacaacgctggacgccggtttgcagcgccaactggaagatatggccgccggctggcggcaccagttgccggagaaaacctctctcggtgtgctagtagtagaccacacaaccatggaagtgaaggcttacatcgcctcggttgatttcggtgatgacagtcgtttcggccatgttgataccatcagcgcgtggcgttcacctggctcgacgctcaagccctttttatatgcgatggcattagatgatggcctcattcacggcgaatccttgttacaggacgttccgcgtcggtttggcaattatcgtccggggaattttgataccggttttcacgggcctgtgagtgctagcgatgcattagtacgttcgctgaatctgcccgcggtacaactcttggaggcttatggctccaaacgttttgccgccaatttgcgcaatgccggcctgatattacgttttcctctgcacagcgaacctaatctggcgctgatattaggcggaaccggcgcacgtttagatcaattggttaccgcttttagcgcctttgggcgtggagggatggccggacagctacgtttcgagccgaagcaaccgttgcttcagcggcggctattttcccccggcgcggcgtggattgtacgacggattatggcgggagaagggaggccggtgcccgacgatattttacctgcggttgtgcctttggcatggaaaaccggcaccagttatggttatcgggacgcatgggcgattggcctgaacgcccgctatacgctgggcatttgggttggcaggcccgacggcacgccggttgcagggcaatttggctatgctactgcggtacctattttgcatcaggttaatggcgtgctcatggcgcgcttgaatcagggaaatcgagcattaccgatcgacccgcggcctgaatcagtgagtcgggaagagatctgctggccgggcggccagccattgccagccggtgacagtaactgccgtcagcgacgccagagttgggtactggatggtactttgccgcccacactggcggctcccggacaggaaaatatccaaggtagccagatgaatatatggctgaataagcaaggtcagcgagtggcggcagattgcccggacgctacgccgacccgtttaactctctggccgttgccgcttgagccttggctgccgtgggcagagcgtcgtgcgcagcgtttgccaccggtaaatgccacctgcccgccgctagcggaaaatgacagtcctccacttttgattctgggtattcgggatggggctgttgtgcgtcgtttaccgggtaagaacagtctggatttacgattggaagcgcagggcgggcaaggggaacgctggtggttcttgaacggcgagcaggttgctaccactcaaaatcatcaatcatggctacaaacgctgacggctccggggcgttatcagctaaatgtgttggatgaaagcgggcaagtcagcaacgttgaattccgactggagtaagaaagtccaaattatcttaattaaaaaacgcaatgcatatggaaatacgatgtatttgttgtttttatattaaaaaatagtgtaaccaataaaatgttgattttatataatcccaattgattttttttattatttttaacctcggctattgatgattttctttcaaagtgaatttttttatttttatttttatttttatttttctttatcaacaatcaacaatcaacaatcaacaatcaatagcaatattggagttttgatgatgaatataaaaatattatcaattataatttttatcacaatattttcctgttttgacgtattgtccaatgagccaaaagtctgtttctttatgaatgatagttatcgaggcgagtctctctgtgctggaaaaaataactcggtggaaagtattcctgaaagatggaatgaccgtatatcatcggtagttattcctcagggattgtctgttaatgtttataaagatattaatttctcaggcgaaaaattagttattaaacaaaatactgactttgttaaagacgaaactaaaataggttttaacgatgagattagctcatttgaagtaaatagtacggcatgtttttatgaaagtgatgagttttctggaagtgcagtatgtctggcggcaaatgaaagtatcgatctttatagcaataactatcatagcaggaaaaactaccacattcttaatccacttaacgatcagataagttctattactgttccccaaaatatgcaggcggttgtttatgaagacgatggttttcaaggggaatattatgttttgacggaagactttacatatcaggatttagaaaaattaaatattaataatagaataaccagtatgcgggtttttcaaaacaatacctttacttgcgatcagcgctgtgtaatcaaagacgttatgcgcattcccttagggaaggcttttggtcattattggttggatgaacgtttgagttctaaagaagtattgataagttttataataaataatgatgatgactattctatttcattcgttgacggtggtgttcttcgagtaaaggatagagaactgtattttatgcatcataataaatacagcagttttatttttcgggttaatgatgatagcgatagattgtcatttctctccagattcaatggtgactattttgaaatacagtttgttgagtcgaaaggaacgagaagtgcttatgtttccccgttgtttagttcactctttaattctggaaaagaaaccgttgattttaaggttagtaatttcaaccttgaaacacccgttgtcattgacaaactggtattaacaggagagcagggaagcaaccgacaaacccgtagcgtgatgggattattatcttgctggtcggtgccgatgctcagtatttataattatgtgattcagggaagctgtaatcagactgacagatttgtcagcaatgccaatgagttctttaaaaaaccgaacgataagatattgcaaatatcgggttcggcaaaacctttacctaaactgaaatcgaatgaaacctttcagacggagcctcaaatcataaatttgcagtctgaacccaaaggtattctcactcaagttcattccgatatgaacggtaaggccttaacggttcctgcgacggcgctggcttgcaaagtttcaatgaaagatcagttacttcctcaactacgctctcgccgtgatttgtctcctgtatgtattgaatggaccttgaatattctcaccgattttactttactgtttggtggcagcacggataactggaatgcggagaattttggacaagttattgaccgaattatacgaaatggtgataccgggcatgccgtatctgatattgaaactgaaactcgtctgattaacacagtccagacgttattcagggaaagtgctcaatcttctggaagccaggacatttttaatctgaaaacggcttttgagttttctcagcttagctatgcggcctatctgtttcatgggaatagtgaagatgaagatagagtgcgaactcctcaggcagtgcaatcactacctcttggacgatatgagctgtcgctgcaagattttcattttgtcgaaaccattcccagaattcggcatggggaacgctgggtagaacatcccgaacagcatttcgatattgaagtgataagtggtacgactgaagcgacggaggctgccagacagcgacttatcccgattattgatgaatggaggcagatttatcatcaagtaaaactgcctgccagagttgacctgccaacggaaattggtgagcctcttgaacaagtcaatcacatggagctgctgcatgaagcatcgcgcttggtgagcgatgtgacacaaagctggttaagaaccagtcgtgatgactacatctatgtgattgtgcgtttgtctggacagatcgtcagtattaccatggcggtagatatcaatgaatttgacgtcgggatcgccggttctctgacaaatccgacctacgtattgcatccgcaggctgagggggcaataagaggagccggcaccgctgcaatcagagcgttggccgattatttgagcgaaaaagggaagcgcacattggtttccagcgtgatcagccagccttcggccatagtgaagaaaaaagttggctttaggtttattgaggaactttgacaatttttggcaagataggaatgatagatctgagcgggtcggtaacaggttaataccctgagctttttatccgcttacttgatttttatgtgaaatgtgatttgtgcacaaaaatgaggaattaagataacagttttttaataaattgttgtcattcccataggcaagcgctttcggcacacatataatctgcgaccacttaacagggtcggcgcaaaaattacttgaaagaatctgcctgtaagccaagcggcaacgctaattcagggtggtttccaagtccggtcaatattagaaatcaaatagaggttgtcatgactgtagaacgtactttttccatcatcaaaccaaacgcagtagctaacaacgacatcggtgctatctacgcgcgttttgaaaatgccggcttcaaaattattgctgcaaaaatgctgcacctgaccaaagaacaggctgaaggcttctacgcagaacataaaggccgtcctttcttcgacggtttggttgagttcatgacctctggcccaatcatggttcaggttctggaaggcgaaaatgcggttcagcgcaaccgtgacatcatgggtgcaaccaacccggataacgcgctggcaggtactctgcgcgctgattttgccgatagctttactgctaacgctgttcacggttctgacgccgttgagtctgcacaacgtgaaatcgcttatttcttcggcgaaaacgaaatttttccacgcagctaataggttgatttaagggaggtcagggcaattttcatcggctgacacaataaaaatgcggccatgccctttcaaccgtagaatccatgccttaaaattcgtacaatgccgcgccccggatgagccagctctaccggggcatttttattatttatccatcgccgtttctttaagtgccacccggtttaaagcacagcgccgcaaagtgtaacaacgaggccacgacaactcatgtctgaacaacagttatctgcaacaattcaacccgatgcttctcctgctgccgacagcgcagtgcaggtagcagcgccggccaccgccaaaatcaacctgctcgatttgaatcgtcagcaaatgcgcgagtttttcgctgaaatgggtgaaaaaccattccgggcagatcaggtcatgaagtggatgtatcactattgctacgatgatttcgagcaaatgaccgacattaataaagtgctgagagcaaaattacagcgcgtggctgaaattcgggcgccggaagtggcagaagaacaacgctcagcggatggcaccattaagtgggcgatcaaagttggcgaccagcaggttgaaaccgtgtatatccctgaagccgatcgcgccactttatgcgtgtcttctcaggttggttgtgctctggaatgtaaattctgctcaaccgctcagcagggtttcaaccgtaaccttcgtgtttccgaaattatcggtcaggtatggcgtgcggccaaaattatcggttcgctgaaatcaaccggcactcgcccgatcaccaacgtcgttatgatgggaatgggcgagccgttgctgaacctgaataacgtggttccggcgatggacatcatgatggatgacttcggttttggtttgtctaaacgtcgcgtaaccctgtctacttcaggtgttgttccggcgctggataaattgggcgatatgattgatgtggcgctggccatttctctgcatgcgccaaccgatgatattcgtgatgaaatcgtaccaatcaatcgtaaatataatatcgaaactttcctcgcggcggttcgtcgctatttagcgaaatcgaacgccaacggcgggcgggtaacggttgagtacgttatgctggatcacattaatgacagcaccgaacaggctcatcagttggcagagtgtttgaaggacacgccgtgtaagattaacctgattccatggaaccccttcccaggcgcgccttatggccgtagctccaatagccgggtagatcgtttctccaaggtattgatggaatacggatttacgactattgttcgtaaaacccgcggcgatgacattgatgcagcctgcggccaattggcgggcgaggtgattgaccgtaccaagcgcacgctgaaaaagaaaatggccggggaacctatagcggttaagacagtctgaaccttacggggcgtttagctccgtttaactgactgttatttaagttttaatctgcaagatgtcaggtgttacgcgtaggtaatacagcaaatatgagggcctgatgcgtcgtcaattattcaggttcttgccattacgcaactggacaattggaagagcatgaagctgaatatactgtggggagcatgtttggcggccgtggttttggccggatgttcggggtcatctccgaataaggttgaccagccggcggcaggtcaaacgcgtttacagcttggtttagcctatctggcgcagggagatttacccgctgcccgtcagaatctggaaaaagccgtgaatgccgctccgcaggattatcaagctcagttgggcatggctttatacgaacagcgcgtcggtgaaaacagcgccgcagaacagcgttatcagcaagcgatgcagctcgctccaggaaatggcaccgtactgaataattacggtgcgtttctgtgtggtttagggcagtatgtatcggctcaacagcagtttagcgctgcggctttgttacctgattacggtcaagttgcagatagtctggaaaatgcaggttattgttttttgcgggctaatcaaaatgaccaggccaaagtgttgctccgccgagcgttgaagtatgatcctgataaaggtgggtcgctgcttgcagaggccgaaaggcaatttggagaagggaaacgcgctcaggcgcaactactactggatgtttatcaacatgttcttccggccagtgccgaaagtttatggttacaaattcgtttcgccgcgctggcaggtcgccaggatagcgttcaacgctatggcaagcagcttgcgcgaagttttccacaatccaaacagtaccagcactttctagctaatgaatactgaagcctcccaagatcaaactgttccagagacgacaggtgtgcgcctgcgtcaagcccgtgaagcattagggctaacccaacagaatgttgccgaacgtctgtgcctgaaagtatcgactattcgggatattgaggaagataacgctcaggcgaatcttgcttcgacgtttttgcgtggttacattcgctcatacgccaaactggttcgtctgcctgaagatgagctattgcctatgctggcaaaacaggcaccgattagagcggcgaaagtcgccccgatgcagagtttttcattgggtaaaaagcgcaagaaacgtgatggctggttgatgatgttcacctggctcattgtttttgttgtgattggtctgaccggtacctggtggtggcaaaatcatcaggcccaacaggcagagatcgccaatatggccgatcagtcttctgcccagttatcgcaaaatgaggggcaaacagtccctctggctgatcaaaacgataacgcggaaaaaaccgaagttccgttgtctgacgctaatgcgtcagctgcgccttcggcaccggaaaccgctccggtaacagctccagccgcggcagggaatgccccggtagccacaggtgaaacgccggcctcgtcagcggtagtttcgccaagtcaggcgactttgcctgaagtgtcaaaccctgccattcctttgccgacggcagaggctgcagttaacgctgccgctgcccaatcggccgggttggtgatgaatttctctgacgattgctggctgcaggttgttgatgcaacgggtaaatcattgttcagcggtattcagaagaagggcgcgaccctgaatttatctggcaaagcaccctataaactgacgataggtgcgccaggggcggtcaccattttgtatcaaggtaaccctgttgatttaagcaagtttgttaaatcaagccgtgttgcccgtttgaccgtcggcgctgagtgatcttgtggttataagtgactacatgactgcaaaggagagcgtgtaatgcataatgaatccccaatcattcgacgtaaatccacgcgtatttacgttggaaaggtgccgattggtgatggagcgccgattgctgtgcaatcgatgaccaacactcgcaccacagacgttgacgcgactgttaaacaaattcaggcattagagcgtgttggcgttgacatcgtccgtgtttcggttccgacgatggatgcggctgaagctttcaagttgattaagcagcgcgccaatgttccattggtcgccgatatccattttgactaccgtattgcgctgaaagtagcggaatacggcgtggattgcctgcgtatcaaccctggcaatattggtaacgaatcacgtatccgtgaagtggttgcctgtgcgcgcgacaagaacatccctatccgtatcggtattaacggcggctcgttggaaaaggacattcaggaaaagtatggcgaacccacgccagaagccctgcttgaatccgcaatgcgtcacgttgatatcctcgatcgcctcaacttcgaccagtttaaagtcagcgtgaaagcctctgatgttttcctggcggtaaactcataccgtttattggcaaaacaaatcaataatccgctgcatctggggattactgaagccggcggcgcgcgtagcggttcagttaaatcggctattggcctcggtttgctgctatctgaaggcatcggtgacacgctgcgtatttctctggccgccgatccggtggaagaagttaaagttggctttgatattctgaagtctctgcgcatccgttcccgtggtatcaatttcatcgcttgcccaacttgctcacgtcaggaatttgacgtgatcggtacggtaaatgcgctggaagaacggctggaagatctgattacgccaatggatgtctctatcattggttgtgtggtgaacggcccgggagaggctttggtttcaactatcggcgtgaccggcgcgcataataaaagcggcttctacgaagacggcgtacgccagcgggaacgttttgacaacaagttgatgatcgaccagttggaagccaaaattcgcgccaaagcagcgatgcttgatgagaaaaaccggattgatatcaaccagctggaagatcaggcgccggtctgatccggcggttgtgtccagcgttgagtaagcgggcttggcccgctttatattgtgcccatagtggtgatgagcgtccccattgaatcacgggacggctagcccctataatcggctttatttttgcatcaaaactatagagaaaagacgtggcaaagaacattcaagccatccgtggtatgaacgactacctgccggctgatacagctttatggcagcgtattgaaggcacattgaaacaagtgctgggcggctacggttacagtgaaattcgcttaccgattgtagagcagaccccgttatttaaacgcgccatcggtgaagtgaccgacgtcgtggaaaaagaaatgtacacctttgacgatcgcaatggcgaaagtctgacgctgcgcccggaaggcacggcgggttgtgtacgcgccgggatcgaacatggtctgctgtacaatcaggaacaacgtttgtggtacatcggcccgatgttccgctacgagcgcccacaaaaaggccgctatcgccaattctatcagttgggtgccgaagtctttggtctgcaagggccggatatcgatgccgaattgattttgctaaccgcacgttggtggaaagcgctgggtatctccgagcacgttcgtcttgagcttaactctattggttcattggacgcacgtgccgattaccgcgaagctttggtcgccttcctggaacagcatcaggaagtgttggatgaagactgcaaacgccggatgtatagcaatccgctgcgtgttttggactcaaaaaatccagaagtccagcagttgctgaacgatgcgccgcgtctttctgaatatctggatgaagaatccaaacagcattttgccggattgtgtgaacttttggatcatgccggtatcccatatagcgttaacgagcgtttggttcgcggcctggattattacaaccgtaccgttttcgaatggataaccaatagccttggttctcaagggacagtctgtgccggcggccgttacgatggtctggtagagcaactgggtggccgagcgacgccagccgtcggttttgctatggggctggagcgtttggttttgctggttcaggcggttaatcctgaattttgcgtaccgccaacggttgatgtgtatttggtgtcttccggtcaggggacacagagcgcagcaatgcagctggctgaaactctgcgtgacgctttgccgtcattgaagctgatgaccaactatggcggcggcaactttaaaaaacaattcgcccgtgccgataaatggggcgcgcgcgtggccttggtgttaggtgaagacgaagtgtctgcacagcaggtagtagtgaaagatctgcgcaagggtgaacaagaaacgctggcgcaagctgatgtagctgcgcgtctggcttcgatgttaggttaaggagagagacaccgtggaagtctataccactgaaaatgaccaggttgacgcagtgcgccgtttctttagtgaaaacggaaaagcgctggccgtgggtgtggtgctcggaattggtgctttggtgggctggcgttattggcagagccatcagaataccgcgctgacggaagcatcttcttccttccagaaagccagtgcggcattggcagccaacaacgctgaaggcgttaccgctgcggaaaaatttgtacaaagcaacagcaacaactatggcgtgttggccgggttggaactggcgcatcactttgtggcacaagggcaatttgataaggctgctcagcagttgagtctggctcagggcaataccaaagatgaaaacctgctgtcgttgatcaacctgcgtttggcgcgtgtccagctgcaattgaaaaagccggaagatgcattgaaaaccctcgatgcggtgaaaggcgatggttggactgcaatggcgcaagacgtgcgtggcgatgcattattaagtaagggcgacgttgctggtgcacgcgcagcttacaccaaaggcgtcgaatctaatgcttctcaggcgttgcaggcattgctgcgcatgaaattgaacaatttgtccagctaaggggaattcccatgcaactgcgtaaaacactcttagtaggactggtttccgtcgccctattgagcggctgctcactgtttaacagtgaagaagatgtggtgaccatgtcgccactgccaacggttgaaaatcagttcactccgaccaaggtgtggagcacttctgttggcagcggtgtgggtgattactactcccatctgcgcccgacctggcagggttcttctgttttcgccgctgatcgtaaaggtctggtgaaagcgatggatatcgatactggtaaacaaatctggcaaaccgatctgtctgaaaaaaccaatttctactccagcaacagatcagccatgctttccggcggtctgactgtttctggttctcacgtgtttgtgggtagcgaaaaagcggtggtctacgcgctgaatgccgacgatggtaaagtagcgtggcagaccagcgtggctggcgaagcgatgtcgcgtccggttgtcagcgacggcgtggttctgattcacactaccaacggtatgttgcaggcgttgaatgagagcgatggcgcgattaaatggacgctgaatctggatgtgccttctctgtccctgcgcggtgaatctgcaccgaccgttgcctttggcgcggctattgttggcggtgataatggtcgcgttagtgcggtcatgatggaacaaggccagctgatttggcagcaacgtatttctcaggtaaccggtactaccgaaattgaccgtctgaacgatgttgatatgacgccaatcgtggtagacggcgtggtttatgcgctggcttacaatggtaacctgaccgcattggatctgcgttctggtcagattctgtggaaacgcgagttgggttcggtcaacgatttcatcgttgattctggtcgcattttcctggttgaccaaaatgaccgcattgtggcactgaaatccgacggtggtattaccctttggagccaaagcgatctattgcatcgtaacttgactgccccagttatgtataatggctatctggtggttggtgatgccgaaggttatctgcactgggtgaataccgaagacggccgttttgttgcgcagcagaaagtggatagctccggcttccttagcgcgccggtggttgtcagcgataagctgatgattcaggccaaaggcggcacggtctacgcgtttactcgctaattatcgggtaatacactggacgaaagctaaactttcaagggtgtgattaccgaacacattggctcttaatatgagtccctaaacggctcctgaatagttcaggggccgtttcgtattctataaactccgctgtccgtgttgttcgatagcgttgtaacgaattgaaaaataagtaatgaggcttcaataatgatacctgtcatcgccctggttgggcgcccgaatgtgggtaaatccactttatttaaccgtttgactcacactcgggatgcgttagtggcggatttccccgggctgacgcgtgaccgtaaatatggtcgtgccgaagttgagggtcatgagtttattgttatcgataccggcggtattgatggcaccgaagatggcgttgaaacacgcatggctggacagtcgctgttagcgattgaagaagcagacatcgtattattcatggttgatgcgcgcgctggcctgatgcctgcggatcagggcattgcccagcatctgcgtagccgccaaaaagccactttcctggttgctaacaaaaccgacggcatggagcctgaagcggccgccgccgatttctactctttgggaatgggagacgttcacccaattgccgcttcgcacggtcgtggcgtagctcagctgattgaagaagtcatggctccgtatatggcgccggtagaacctgaagttgaattgactgaagaagaagccaacgccgcctattgggcagaactggaagcgcaggatcaagatcaggcagaaggggaagaaccagaagaagacgatttcaacccgctggatttgccgatcaagctggccatagttgggcgtcctaacgtaggtaagtctacactgaccaaccgcattctcggtgaagagcgtgtggtggtgtacgacatgccgggcaccactcgcgacagtatttatatcccaatgacccgcgacgatcgtgaatatatcctgatcgacaccgccggtgtgcgtaaacgtgggaaaatcactgaaaccgttgagaaattctcggtaatcaagaccctgcaagcgatcgaagactcgaacgttgtattgctggtgattgatgctcgcgaaggtatctccgaccaggatttgtctctgttgggcttcatcctcaatagtgggcgctcacttgttatcgccgtcaataaatgggatggcatgagcgaagaagctcgcgctcaagtgaaagacatgctggacctgcgtttgggcttcgttgatttcgcacgtattcactttatctctgctctgcacggcagcggcgtaggtaatctgtttgaatccattcaggaagcttacgattgctctaccaaacgtgttggtacctcaatgctgacgcgtatcatgcaaatggctgaagaagatcatcagccgccgctagtacgtggtcgccgtgtgaaactgaaatacgcccacgccggtggttataatccacccatcgtggttattcacggtaatcaggtgactgatttgtccgattcctataaacgctacctgatgaactatttccgtcgttcattgaaagtgatggggacgccgatccgtattcagtttaaagagggtgaaaacccgtttgctggcaagcgtaacaccttgacaccaaaccagatgcggaagcgtaaacgcttgttgtcacatctgaaaaagaaataaagtaagctagcagggcgcggatattccgcgcccttcgtgtttctggctaatggctaaaagtattgtttacgaaatgagtttgggaagacgttatgtcatgggaaacttggagttttgcgtttagcgtaacagtaccgaatttattgatgatgttacttggcgtcatgttgcgacgctggcgtctgatggacgacagtttctgcgacggtgccacccgtctggttttcaatctcgctttgccttgcctgctattctttagcgttgccactaatcacgttagtctggccgatcatctaccattagtgatttacggtgcagtcggcacgttgattaccttttcgctgctggaagtggccgctcactggctggttaaagagcctcgtgagcgcggtgtattcgtgcagggcggctttcgtgccaataccgccatagtggggttggcctacgcgatgaccgcttacggtgatgaaggaatggcgctgggggcgatgtatctgacggtcacggtaatattattcaacgttctgtcggtgatcacgttaactcgcagtctgaacgcggccaccgacggaaaaatcagccagagcgccttattgaaaagtattgtgactaacccgctaattatcggtctggtttgcggcttactctatgctcaaacccacctgccgatgccgcaggttattcagcaaaccggtggttttatttccgctctggcactgccgctggccttgctttgcaccggagccagcctggactggaaggcgatgtttcgttcttctaacgtggcggctttggcatcctccgccaaactgatttttgtacctttaatcatgacattaggcggatggttgctgggttttcgcggtgctgcactgggaattatcttcctgttttcagcgacgccaacggcggcgggcagttatgtgatgacgcgagcaatgggcggaaatgccactttagcggctaatattatcgccattactaccgtgggatcgttctttactacggccttgggtatttatttcctgcgtacattcggcgtgatttaaggagaaaataatggaagctctatgtccggtgtgtcatacagcgatggatgaggtaagtagtcactttcactgtgctacatgcagtagcgactatcagccgcaagcgatttgcccagattgcgaaaagccgttacaggtgcttaaggcctgcggcgcagttgattatttttgtcagcacgggcatggtttgatttcgaaaaaacgcgtgaaatacgagtataccctgcatctttaacgccgcagcgagttgtcaattgtcttactgacacactggatagcatcgtacctggtgacgataaaaactgagctatttcgccgccgttcgcggcttacgtgcttttttcaccggcgttagctgcgtaatttcactttccacccaaccatcctgcagccgggttttcagcgtatcacccacctgtacttgctgagtggtttttagcagactgccgctgggggtttgggtcacgctatagccgcgtgccagtgtagccagtgggctaacggtttctaactgagaacaggcaatcccaaaacgttgacgataagcgtttagctggcgctctagcgcctgtttcagacgatattcctgctgctgcacttgttgactgtaacgatggatacgtccctgcggctggacgtgactcagccgttgttgcaaacgctcaacccggcgaacttgcaggcgaatttggttttgagcgcattcttccaaccgacgttgcagtttaaacaacaacgtttgctggcgcgccaaacgcaaatgaggatgctgttgctgtaagcggtgatgcagttgggtaaattgttgattacgctgcgccagataataatccatcgccatttccatgcgctgttgctgcgcttgaatctgacgcactaattccagctgattgcggctaacaatttcagcggcagcagaaggcgtcggtgctctcagatcggcaacaaaatcggcgatagtcacatcggtttcatgcccgacggcgctgacaatcggaatccggctggcaaatattgctcgcgccacccgttcatcgttaaaactccataaatcttccagcgaaccgccaccacgccccacaatcaagacatcacactcagcgcgccgattggccatttcaatcgcgcggacgatttgcattggcgcttcggcaccctgaaccaaagtaggataaatcaccaccggcagcgaaggatcgcggcgctgaagcacctgtagcacatcgtgcagagccgctccgctggcggaagtaatcacgccgacccgtttggctggggcagggagcggctgtttgtgcgccgcttcaaataatccttccgctgccaattgtgctttcaattgctcaaactgctgttgcagcaaaccatcgccggcaggctgcatactttcagcgattaactgatagtcacctcggggttcatacagagtgattgaggctctgaccagcaccatctgaccattttgcgggttaaaagtggtgcggcgattgctattgcgaaacatcgcgcagcgtacctgcgcccgatcgtctttcaaggtaaaataccagtgaccggaggcgggcttggaaaagttggatatctcggcggtgagccaaatctggcccatttccatttccaacagctgtcgaaccgtctgattcaggcggctgacggtaaatatcgaggtggcggaagttagtggcatgtgacctggatcaaattttaaaacaagtacttaattgatcgatattacctgcctcagaacggtaagcaagaaaatttatcagaaagtgctggaggcaaccgattacgctctgtataatgccacggcaatattttatcttttctcaaatcactctggtgagatattgcccatgctacgtatcacgaaagaagcactaacctttgacgacgttctcctggttccagcccattccacagttctgcctaacactgcggatcttggtactcaactgaccgcaactatccgcctgaatatccctatgctgtccgcagccatggataccgtaaccgaatctcgcctggccattgctctggcgcaagaaggcggtctgggcttcatccataaaaacatgtctatcgagcgtcaggccgaagaagtcagccgcgtgaaaaaacatgaaagcggcgtggttactgaaccacagaccgttacgccaaccaccactttgcgtcaggttaaagaactgaccgcccgtaacggctttgctggctatccggttgtgaccgaagattacgaactggtgggtatcattactggccgtgacgtacgctttgtcaccgatctggaacagcctgtaacggcggttatgacgccgaaagagcgtctggttaccgtaaaagaaggcgaatctcgcgaaattgtgttgcagaaaatgcacgaaaaacgcgttgaaaaagcgttggtagttgatgataacttccatctacgcggcatgatcaccgtaaaagacttccaaaaagcagaacgtaagcctaacgcctgtaaagacgaacacggccgtttacgcgttggcgctgccgttggcgccggagcaggtaacgaagagcgtatcgacgcactggttgccgctggcgttgacgttttgctgatcgactcatctcatggtcattccgaaggcgttctgcaacgcattcgcgaaactcgcgctaaatatcctgatctgcaaattgttggcggtaacgtcgctacaggcgcaggcgcaagagcattggcagaagccggtgttagcgcggtaaaagtggggattggccccggctctatctgtactacccgtatcgttaccggcgtgggtgttccgcaaatcacagcggtatctgatgccgtagccgcgctggaaggcaccggtattccggttatcgccgatggcggtattcgcttctccggtgatattgcgaaagcgattgcagcgggcgcgtcctgcgtgatggtgggttctatgctggcaggtactgaagaatctccgggtgaaatcgaactgtatcaaggccgttcattcaaatcctatcgcggtatggggtctttgggcgcgatgtccaaaggttcttccgaccgttatttccagactgataacgccgcagacaaactggtaccggaaggtatcgaaggccgcgtagcgtacaaaggtctgctgaaagaaatcgttcaccaacaaatgggcggtttgcgctcttgtatgggtctgaccggttgcccgaccattgacgatctgcgtaccaaagcagaattcgtacgcatcagtggtgcgggtattcaggaaagtcatgtgcacgatgtgactatcacgaaagaatcaccgaactaccgcatgggctaattccaagagctgcggtcggtgagttttgtcatcgtccgctgctcgcattgctcaatgactttgcgtcaattgcgtatgtgatgctgcgggcgttaactcactttctggcttcgccgattggaataggacgtttattaacgttgctgaagtctttcatttttattttatttattgacctgtttctggaatacgcctcacatgacaaaaaatatccataagcatcgcatccttattctcgatttcggttcgcaatacactcagctagtggcgcgtcgcgttcgtgagattggcgtttactgtgaactatgggcgtgggacgtaactgaagcccagattcgtgagtttaatccgagtggcatcatcctgtccggcggcccggaaagcaccactgaaaacggcagtccgcgtgctccagacttcgtgttcaacgcaggcgtaccggtattgggcgtgtgctacggtatgcaaaccatggcgatgcaactggggggccacgttgaaggttctaccgagcgcgagttcggctatgcgcaggtagagatcaaaactgattctgcgctggttcgtgatattaaagatgctctgaacgcggccggtgagccaattctggatgtgtggatgagccacggcgataaagtgacggcaattccgtctgactttgtcaccgttgctagcaccgatacctgcccgtttgccattatggccaacgaagaaaaacgcttctatggcgtacagttccacccggaagtcacccacaccaaacaaggccaacgcctgttagagcgcttcgtattggatatttgccagtgtgaagcgctgtggacgcctgcgaccatcatcgaagatgcagtagcacgtctgcgcgaacaaattggcgaagatcacgtgattctgggcctctctggcggtgtagattcttccgttaccgctatgttgctgcaccgtgccatcggtaagcgtctgacctgtgtattcgtggataacggcttattgcgtttgaacgaagccgatcaggtgctggaaatgttcggtgataaattcggtctgaatattgtccacgttgcggcggaagatcgtttcctgagcgcactggccggtattgatgagcctgaagccaaacgtaaaaccattggccgcgtatttgtggaagtcttcgatgaagaagcttgtaagcaagagcaggtcaaatggttggcacaaggcaccatttatccggatgtgattgagtctgcggcctctgccaccggtaaagcgcacgttatcaagtcacaccataacgtgggcggtttgccgaaagaaatgaagctgggtctggttgagccgctgaaagaactgttcaaagatgaagtgcgtaaaattggtctggaattgggtctgccgtatgacatgctgtatcgtcatccgttccctggtccaggtttaggcgtgcgcgtactgggcgaagtgaagaaagagtattgtgacctgctgcgtcgcgctgatgcgatctttattgaagagctgcataaagccgatctttacaataaagtcagccaggcgttcaccgtattcctgccggttcgttccgtaggtgtcatgggcgatggtcgtaaatatgattgggtggtttctctgcgtgcagtcgaaactatcgatttcatgaccgcgcattgggcacatctgccctatgatttccttggccgtgtatctaaccgcattatcaatgaagtcaacggtatttctcgcgtggtgtatgacatcagcggcaaaccaccggcaaccattgagtgggaataacagcccgaaataaataattttcgataaaaatccaacccccgtatatttcgggggtttttcatttatttcatttaattaattttgttaaatgaaataagatgtttattgttattttgtttttatattctacttctcacaattaatatttactcgtgatacggacttaatatattgaatctgtttattgaattgatataggtctggctatactctgagcggttagctacgcttggatgctattttgtatttcttgtatttcttgtatttcttgtatttcttgtatttcttgtatttcttgtatttcttgtatttcttgtatttcttgtatttcttgtatttcttgtatttcttgtatttcttgtgtctttaaccttggttttttatatccccatattgtctaggctgtttttttgaatgagggtaagctatgttattatgagaataataactaaagcatgtgataaaaaagaatgtttcagtatttttacttacgtcgagtttccagtatttcctgatgttgaaataattaaatttattcgattcgagtatcggttgtcatcaataccaatgggcgctctgatattaactatgctgcaaggtctatagttattcgtaaggatataaatgagttaagcctgcacgatttacaggagcgtataagcgctaagaatagttgcctgaacccactgataataccgataatacaatcgattttaaccatgctgttggaggggctaaacactatcttcattactatggtaataaagaaaataaagatggaaatggttttattgctgaaggtttacctaaaagaataaaaaggattgggttcatataatatattgtaccgatgcaggcaggtgatgacggaatgtgttgatgaatgtaaatggtgacatatgtaatctcatatactcataattatcgtcgtttaccctcagcgccgtggatgatcgatccggcacctgcacctgaaataatggaagctgctccccacatcatttattacatgatgggatttgcaccacgagagatattcgtaacttcttattaataagtatgagggatatgctggtagtcaataaataatgtcattgtcttaaacacacaatattgttttaaaattaataatgctgtcgttttactttatgttacccgttggggttgaacactatcgccttgacgaatatttacctatcaactaaatgtttaagttatagaacaccataatttacatcgctaacaggcgagataattattttttcacaacagaacttttcacctcagcgagctgagaaatacgctgcggtttagccaaacagtcacccgcatcgctgaatcaaatcgatgattactgtagggcgtacttagtgttttgtggagagaaaacatgtcgttacatcccccatctatacctcgcgttaacggcgtatcccgtcggcgtttattgggatatgtcggcgttgggttagtcgccagcttgatgagtccgctgtccctgaatgtttttgctgcttcaacctcaacgatgccgctcaatctggagcgatttatgctggtttcgcgtgctttgaccggtaagcgtcaacttaatccccatatcggccagcggatctatcaggtacttattctgcgcctgccgcagctcgatcaacagctggctttactccaaccgcttccggctggtgagccacaaaattggtcgcaggcacagcagggcattgcccggcaggtcttgcaggcgtggtatgtgggcgtgataggggaaggctcgaatgcggcggtgattagctacgagaatgcgctgatgtttgaggccgtgtctgatgttttagtcattcgctcctattgtcctaaccaacccggttattgggctgccaagcctgacgtggccatataattcaggagaatacttttatggctgatactttgcaggctgacgtgattgttatcgggtccggcgtagcgggagggcttgtcgcgcatcagctggcgctagcggggaaatcggtattgatactagaagcggggccgcgcttaccgcgttgggagatagtggagaacttccgcaatcagccggataaatcagacaacatggccgcttatccttctactccttacgcacctcatcccgaatttaatcctgataatcactacttgattcaaaaaggggaacacccttacgacgtacaatatatccgtgctgttggcgggacaacctggcactgggccgcttcggcctggcgttttttaccgaatgatttcaaattaaaaacgctgtatggcgtgggattagattggcccatcgactataccgcgctggaaaaatggtatttccgtgctgagcaggaactgggcgtttgggggccgaacaatgaagatttgggatcgccccgcgcgcagccttatccgatggaaccattgccgctttcatggaacgagcagcgaattaaaaccgtattaaatgcgaatggattttatgttgtaaccgagccggtggcgcgaaatagtcgtccgtatgatggcaggccgacctgctgcggtaacaataactgtatgccgatttgccccattggcgcgatgtataacgggattactcacgttgaaaaagccgaacgagcgggggcaattgttcgtccgcaggcggttgtttataagctggaagtgaacgatcggcaggaaattgctgcagccttgtttaaagacgctcagggcggggaacatcgggctgaagggaaattctttgtattggctgcgaatggcatagaaattccgaaaataatgctgatgtccgtcagtgaaaaaaatcctcgcggagtgggcaatagttcagaccgtgtgggacgaaatctgatggaccatccgggtattggcgtgactttcctggctaatgaagcgctgtggccggggcgtggtccgcaggaaatgacgtcaatggtggggttccgcgatggcgctttccgtgctgagtatgcggccaaaaagattcatttatcgaatttatctcgtacggacgaagtgacaatcaatttgctcaagcagggggatttacagctagggccgcagttggaggcaaaaatccgcgaccgggcggctcgctacgtgcgttttgacagttttcacgaaattttgcctcatatggaaaaccgcattattcccagcctaacggaaaaagacgccatcggcatacctaaacccgagttttattacgccatggatgactatgtgcgcaaaagtgcattgcatacccagcaggtctatgctgatgcggcgcggctaatgggcggaaccgaagtggtattccataatgatttcgccaacaacaatcacattactggcaccactattatggggaacgacccaaaagactcggtggtggatagtgattgccgtactcacgatcataaaaacctgtttatcgccagtagcagcgtgatgcctaccgtgggatcggttaactgtacgctgactatcgctgcgctctctttacgcattgccgaaacgttaaaggccgaggtgtgatatgaaaaagcaaactctggtctggctggcgttatgcggtgcctttagcgcgacggtgcaaggagcggaaggtacggatctgattaaacgaggggaatatctgactcaggcggcagactgcgtagcctgccataccaccaaagggggaaagccttttgccggaggattagcctttaaaacgccgatgggaaccttatattcaccgaatattacgccggataaagcgacgggtattggggagtggaatgacgaagagtttattcgggcgctgcatgagggaaaagggaaagatggtgagaatctctatcccgctttcccttacacttcatacactttactaacggatgatgacgttagggcgataaaagcctatctgtttagcctgcctgcggtacatcagccaaatcgtgaaaacgatatgccattcccgttcaatcagcgttggggactgtggttttggaattgggtgaattttgaagggcagcgtttccagcctgataataatcaaagcgccgagtggaatcgcggtgcctactttgtcgaggcgctggggcactgcggggaatgccatacgccgcgcaatttcaccatgggaatgaaagacagcaaagcctacggtggcgctgaaattaatggctggacggcatttaatattacttccgatcctaatgcggggattggcagttggagccaggagcagttggttcaatacctgcgcagcggccatgttgacgggaaagcgcaggcagccggaccaatggccgaagtgattgaaaacagtacccgtcacctgacagagagcgaccttaacgcgatggcggtttatttacgaactttgaaaccgctgaatctcgatgatgaaaccaagagccgctcagactgggggcaaccggcaaccggcgtcgattcgctacgcggcaaggcgtttagcgccgatgattacactgatggcgcgcggctgtatttggggaactgtgctagttgccacagttttaccggcgcgggagttaaggacggttattatccttctctgatgagaaactcagtggttggagccacgacgccgaataatatggtcaaagtgattttgcacggggtgactcgccagactaacgacggtgaagtgttcatgccgggttttgccaacaccctaagtgatgaacaagttgcgactctcagtaactatttgctgcaacagtttggtcagccgacgttgaacatcaaagccgacgatgtgaaagcattacgcgaaaactagcctgagcatagggtaatctgacgcgaaaggagcgaagcgtccgattacccattgccgaaatgatttttagctcggttttacccaatgcatcaaaatatattcgccatcttctcctttgccggtggcgattttctgccagccattttgctgataaaacgccagcgctcgctggttgcggactagacactttaacaccccggtagcggtcaattccctctgtaccgcctgtagcagtaattttcccacgccaagaccctggctgctcggatcgacaaacaggttatgcagaaagttttcctcccgaaaaaccgaagcaaagcccagccggttaccgtcctctaccgccaccaaaatcttttctcccaataccgctttatcgaagtcttccagtcggaaattttcctgattaatccagctaaaggcagcctgacgggaagccagatacagcgttcgtaaaaagggacgatcggcttcctgatattcacgaatgttcattttatccccctgagtagcgacttatcacccttgagccagagttgatcttatcttatcaaccgctgataatggtcgttctgactcggggtgccgcgctaactcactgtgtggctgagattttacccgtattacctgatctggattatgccagcgtagggaagtctcggcatcctctgggtaccgccttcttgaccgccggttgggaggaatatgtaccttcgacctaccgttttactcgcttctgctatcacagcttatctgttgtctccatcgatcgtcttttccgtggagatatgccaatgaaacgtctcaatgcattaaccatagccggaactgaccctagcggcggcgcgggtattcaggctgatttaaaaaccttttctgctttgggtgcttacggaaccagcgtggtaacggctttagtggcgcagaatacgcgaggcgtgcagtcggtttatgcgatagaccccgcatttgtggccgctcaattggattcagtcctgagcgatgtacgtattgatagcgccaaattgggtatgttggccaatgaaaatatcgttcagatagtggcagaaaagttacggcaatacccactggatttcgtggtattggataccgtgatgctggccaaaagtggcgacccgctgttagagcctgcggcggtggcggcgctgcgtcagcaattgttgccgctggtttccctgattacgccaaacctgccggaagcggcggcgttgttggattgtcagcctgcgactaatgaatgggaaatgtgcgctcaagggcgggaattactggctatgggctgtcagggcgtattgatgaaaggcggacatttgaccggtggggatagccccgattggctgtttacggctaatggcgagttccgtttctgtttaccccgcattgccactcgccacacgcacggcactggctgcacgctgtcggcggcgttggcggcgctacgaccaacacaggaaaactgggcgacaacggtctccgctgctaaatcttatctgcaaggcgcgttggagcaggcggatacgctggaggttgggcaaggaatcgggccggttcaccacttttatcgttggtggtagcccagccagactggcgctcagtttattcggcgatcaggaatgggcgggtgagagcgaacagcgccagcgcccgctgtaagtgaacggcgtcaaaaggattcagaataaagtgctctgcgcctttacgtgggcgaatgcagggtaataggctgatattaccctgctgatcttttttctgatcaaatacatagctgccgatgtcatgttcgttttctcgccatgaaatcatcaccgccgcgtgaggatgtttatcactttttggccgtatagcgaaaaaataatctccggcccagaacccgccgaactcgccgtcaatctgtcggtttttactgcagaacaccgcggaatcagcaacctggtcgatggctttcggcgtaatttcctgatgaagccgctgccacagcggacgaccattttccaactgccagcaggcttcaccgagataatcgttcagatcgcgccagtcttgctctaactgctggatcaaggctttatccagaatattgcggtattgctgcatgccgttaagctcgccttccagcgcctcgtaggtaatcaattccatcgtccgcgggcggcggcggaaggtcatccagagcaccattttaggaatacggaattcgatagactgcacgctcagccgatgcctattgcctttattcagcacaaaaccgttcgcggtgccgcgtttattctgatagttacgtaccaccatcacgctgtttagtcccatccagccggtgacgtagtgttcgtcctctgagttggcgacatccagatcgaccaccatttgtagaatcttgtcggtggtgactgtctttagcgccggagcatccgtcgcagaataatacaatttgggtatgttttgagaaaattcgaggctaggcatagaggcagatcttcttggtcaataatctggttcatagcttaactcaagttgtcataccgattgttgaataactgaatttagcgtggaaattcgtgctggggatcaactttttcctgcgtcgcgggtcttatgaactgaataacagggcggtgaaaccactgttgaatatcaaatgacataaaaaggattgcgataatgaaaggacagaaaaccctccattgtcttttactggggacgttattgagcgtgagttcatggagttttgcccagcaaacgttgaccacggcagagttagttcagcagccgcagtataaaagcagctggcaaaaaatgattaaaggacagaagaatttgcctgcctgggcgcgtaaaggtgccggaacctctgcgccaccagaatgggccgagtgggaaggtaaaaaatatcaggttggtaatatttgtaagcctcacgattgcgccagccatttcttgctggtggctttcagcgaggataaaaagcgggcttggggcgtgcggattagcgtagaagataagccagaagccctggaaacgccgagtcaatttgccacataccaatggttaggccagccggatgaaagaatgaaaaacttattgatggcgcagctcgagaaagatcccaactggaaataaacgccctttctgacgcggaaaaataaaacggcgcatttagcgccgttttgtttagcttcgctctattgaactgactatttctgcagtgaatggataaataagcgataccattcgctattgacggttggcagcgtgatttcaacccgttctaaccgcttcagcgtctggctgctatcgtaatcgatggttgtttcctgcaaagattgatagaagttatccaattcctcatcgctggacgtcatcatgtcctgaatcagtggggtgataggtaaaatctccccttgttgatagcgacgatgcgcctcgcggagccactgacgatgggaaaccacggtcatcggctgtggcaaatgagcatttaactgctcaataaattcacgtcgagacattccttccatggcggaaaggtggaagatattctccgtcggataatggctagaaccgagatgcgccaaagctttcgcggtgtaatccaccggagtcaactggatatcgccgtagacatcatcgaaggccatgcccatctgaacgctgctcttaaacagacggtaaaatgcctgtagctcgtcatagcgcgccagttctgaatcggcggtaatcaggcccaggcggaaaatattacaggcaatgccacgggcgacggccagattgacgatttcctcgccaacccacttactcgccacatagccttgatctgcaatgtgttgctcatcttgaattgatgactgctcattcaccacgcgatggccttgctgcccaatcgggctgaatacgttcagagtcgacgcgaaattcagaattttgcgacttccctgcgtggtcagacgcagcagttcaaccagacttgcaacgttggctttatacgccatttcaaatgactcaaggtgattcatgcttaccgccgaatggaaaataactcccacgtcctgcgctaagcgttgataaagcaggtcgtcgatacccaaacgcggcgcttttatatctccttgaatagtgatgatgcgttgctcgtcgcctttgcgccacagcgaccattcggtaagaatatttctcaaccgttgcaggctatcctgctggttatgacctcgtaccagacagtaaattttgctgtcggtactatccagtaattctcgcagcaggaaacgccccacaaagcccgtggcaccggtgaggaaaatagcatttccctgattgatagactgcgactgtggctgaatatcttccggtaacaacgcctgttgacgcaggttaatcacgtcgctgacgcgagcttgctgagtgattcggctcgccaattgttttaccgttggcgcaataaagatgtcgctgacgctgaccttatcatcgatagcggcattgatcagattcaccgcgctaaccgccagtaaagagtgcccgcccagctcaaagaagtgatcgtggcgaccgactttttcgctgtccagcaggctttgccagatttcggcaatcgtggtttccagcccggccagcggcgcttcataaggttgatgcaggaaggcattttcctgcggagccggtaaagccttgcgatccagtttaccgtttggcgtgatcggcatactattcagcagcacataggcggcgggaatcatgtaatccggcagacggctttgcaggtagtggcgcaaagccataggctccggcgcaggcgagttggcatcagccaccagataggcgaccagccgcttgctgcctttgttgtcatccagcgccagcactgcggcgtcactgatattggggtgatcgttaagcttagtttcgatttcgcccaattcaatgcggaatccgcgaattttcacctgatgatcgttacggccgtggaactgtagccgtccgtctgcaagatagctggccagatcgccggtgcgatacatgcgagcgccttcaaccgaacggaaaggatcgggcaggaagcgctcggcggtcatttctggtaggttcagataaccgcgagtgacgccaggcccgccgatatacacctcgccaataacgcctctcggcaccagattgccgtggttatccaacagataaatacgaatattcgccgttggacggccaatggaatcaatctggctgatacccaatttaggtgagtgagtggtcgcggtaatggtggtttccgttggcccatagcagttcaccagctcaggtttctcagggtaacgtttgagccagcgctccagcatttccggcgcggcggcttccccgctgatacatatcagccgtagagcgttcggcaacggcccgcggctttcttcgcacagtttgcgccagaactgatacggaatatccagatagctaatgccatattgctcacacagctgccagaaatcgctgctaccagccagccattgatcgtcccgcagcaccaaagtggctccagaggttaacgcggagaatatctcggacactgatacgtcaaaggtggtgttgcagaattgcagtaccttatcctgtgggccaagattccattggcggcaccaggtcaccatttgttgcaccagattgccgtgctcgaccaatacgcctttcggattaccggttgagccagaggtatagatcacgtaggccagattctgtggagccaggctcggctgcggatttacccctgtctcctgtaatggagcgcttactgctggcagtaattcgtgaggaacgccgcagtctttaaacagcggcagtgtcgccggttcagccagaatagctaccggtttggcatcttccagcatgaatttcagtcgttcaggagcaatatcatgtggcagagaaagataagcgccgccggccttcaggatcgccaaaatgccgacgatcatttccgggctgcgatcggcgcagatcgctacccgatcttccgctttgacgccttgttcgatcaatagataagccaggtgattggctcgattatttaattcgccgtaactcaatgaataggcgttattcactaaagctatagcgtccgggctgcgctctgcatgttgctcaaataaatgatggatacacaggtcggcaggataggactgcgccgtctgattccactgttccagcagtaattgcttttctcgatcggcaatcaaatcaatctgaccgatgacctgagcgtcgtttttcaccattgcttccagcaccgcgattaaatattgctggtggcgctgaacagtggcttcatcaaacagggcgctggcgtaattcagcgagccggtgatgattttattgcgttcccctaaactcagctctaaatcgaattttacccgactgaccggtggttcctgcaacttcacgtccaatcccaccatgttaaccgcgatatcgtcgatattttccagagcaaacatcacctggaacagcggagttttatccatgctgcgcggtggttggaggatttctaccacttgctcgaacggcagagcctgatgttcctgcgcgtcgagagtggttttccgcacctgtgccagcagatcggcaacgtttgaggtcgtggatagattgatacgtaacgccagcgtgttgacgaagaagccaatgacgccctcgcattcagcctggttacggttggccactggtgtccctattaccaaatcatcctgaccggacagacgcgacagcacgatcgaccaagcgctgagcagcgtcataaacaaagaagtaccgtgtcggttactcaggcggcgtagctcatcagaaagctcgctgctgagtacgataggcagactggcgccgataaaggattgctgaggcggccgcggccggtcggttggcagcgtcagacgttctggcgcaccggttagcagttgctgccagaatttcccctgttcatgccagaccgggctattgcgccattgctgctgccaaaccgcataatctggatattgaattggcaacggaggcagtgggttagcgcgttgttgtaacagcgccgagtaagtcactcccagctcgcgcaccagaatttccattgaccaaccatcggtaataatatggtgcagcgttaacagcaggatgctctggttgtctcgcaggcgcagccaactggcttgtaccagcgagtccttcgctaaatcgaatattctccgctcttcctggctgtatatttcctctactttttctgcgctatttgcctgttcgcgccaatcatattcaacgaaaggaatacctgactgactatcccgaagtctcaccacaggttcattctgtccggatgaagtaaagttacttcgcaatgattcatgacgtgcatataagatatttagcgtttgctgcaataccgggatattcacatcgccgcttaatgctaacgccatcagcacgttatagttggaatcactgtcgctaagctgggacaagaaccacaggcgctgctgggagaaggacagtggcagcggtttatcccgcgtagccggaacaataatggcagtcagcgttgtatcacctgtttggccttcacggtcgatgacttctgccagttggcttagctgcgggttatcgaacagcgctgccagcggaatgctgatattgagcaattgctgtagctggctaatgacccgaacggccagtagcgaatgcccgcctaactcgaagaaatggtcgtttcgtcctactttttctacgtccagcaacccttgccaaatttctgctaacgtggtttcaatgccagcccgtggtgcttcaaaatcgcgatgaataaaagcgtcttcctgcggagcaggcaaggctttgcgatccagttttccatttggcgtaatcggcatttcgttcaacagaacgtaagccgcaggaaccatatattcgggtaatagcgcggccaaatgattgcgcaatattgcaatatctggacgaggctgttcggtatcggctaccagataggccaccagccgtttgctgcctttaccgtcgtcctgcgccagcactgcggcttctttcacctgcggatgggaattgagctgggtttcaatttcgcccagttcgatacggaaaccacggattttcacctgatgatcattacgcccgtggaattgtacgcgtccatctggcaggtagctggccagatcgccggtacgatacatacgtgcgcctttcaccgtactgaatggatcgggtaggaaacgttcggcggtcatttccggtagattcaaataaccgcgcgtaacgcccggcccaccgatatacagctcgccaatggctccctgcggcagcggatcaccgtgcggatcgagcacatagagccggttattggcaatagggcgaccaatgctatccagctgcgtctcccctaaagtcggtacgtgagccgtcgcaacgaccgtagtttcggtcgggccgtagttgttaactaactgtggtttaaccggataacggctcagccagcgttgcagtatttccggcgcggcggcctcaccgccgaagaaaagggttcgcagcgatggaggcaacggatagtcactttcttcagataaacggcgcaggaattggtaagggagaaccatacgactaatgttgtagtgttcgcatagctgccagaaagttttggtgccggacagccattgatcgtcgcgtaagaccagattggcaccagaagtcagtgcggagaaaatctcgcataccgaggcgtcaaaggtagggttacagaattgcaggacgttatcacccagcccaataccccaacgttcacaccaagggctaaccaattgcaccagattaccgtgttcgaccatcacgcctttcgggttaccggtggagccggaggtgtagataacataggccagattttcgggactgacggctaccgtcggatttgggatttcaccatggttttgagtgatatcagacatcaggcacagtggaatattgcagccgctgaaacgatgttgtccctcgctttgcgccacaatcgccgcaggtttggcgtcttctagcataaaattctgacgttctggtgccgtatccggcggaatggacaggtaagccgcaccggccttgagtgttgccagcatagcgataatcatttctggggtacgatggctgcaaattgcgaccttatcctccactttaacgccctgagcaagcaggtgattggccaaatggttagccagattatttagctcggcgtaggtcagggacgtttgttgataggtgagcgcaatcgcttcgggatggcgctgtgcctgtagttcaaataactgatgggcgcaaacatctagcggataaggttccgctgtctgattccactgattgatcagtaggttgtattcgcgatcggaaagtagcggaatacgatcgacctgtaggttatcgtcacgaaccatcgcccgcagaacggtgatcagatagtgctgatggcgttcaatagtcgcctgatcaaatagcgcggtagcgtagttcagggaacccacgatcgaacgattgcgagtgcctaaattcagttcgagatcgaattttacgcgtgtaacctgcggatcgatcaattctacattcataccggttagcgccggggctacggcgtcgaagttttcccaagcaaacatcacctggaacagcggcgttttatccatgctgcgctgcggttgaagtaattcaacgacctgatcaaaaggtaattcctgatgttcctgcgcgctgaggctgaagtcgcgtacctgtgcgagaagctctgccacagtaggagcttcggcaagattaattcgcatcgccaatgtatttacgaagaaaccgaccagcgcttcgcattctgccgcctgacggtttgccactggcgttccgatcaccaaatcttgctgcccggaaaggcgtgatagtacgacagaccatgcactcattaatgtcatgaatagcgtagtgtgatgtttttggctcagacgacgtaaatcgtccgacagctgttgatccaaaacgatgggaaccgccgcaccgaggaaagactgctgagccggtcgctcgcgatcggacggtaaagtcatgcgttctggtatgccctgcaatttttgcagccaaaattggccgtgggcatgccactccgggctatccagccactgttgttgccactgcgcataatcaggatattgcagtggtaatgccggtaatgggttggtttcgccttgagaccaggctgagtaaagcacccccagttcgcgtgccaaaatctccattgaccagccatcggtgacgatatggtggataatcaacagcaaataatgctcactggcggcggtatgagccagactggcgcggatcaacgggccgtgggcgatatcaaatttatgggcgatttcatgctgatacagttgccagaaatcctcatcggcatgagatgacgcagcgaaatcatactcttgcagtggcgcttgtgtgccaaccggcagcagttgaacgtagccgaccccgttttccgcgtggaaaaccgaccgcaatgcatcatgacgatccagcaagtggttaaggcaacgctgtagaagttgggcgttaagtttaccattcattttcaacaataacggaacgttatagttctcatcgttgttccctagttgctcaataaaccacagtcggttttgcgggaatgacagtggaatccgcgcattagcatcaattcgtgcaatttgtgtggccgtttgttgcttggcctgagcaactaataacgccaattgagcaagcgttggctgggcaaaaaacgcccccatggtgattttgctctgccagcgggattgcatcttacttaagagcttcattgccagcagcgaatccccgccaatagcaaagaaactgtcattgcgcccaattctctcctgacagagcacttctccccatatttcatgtaattcctgctcggtgtctccttgaggagcctcataggattcgtgcacataggcattaaaatcgggggcaggcagctgcttgcgatcgatttttccgttaggcgtcaacggtaaatgatcaacggaaacataggcgataggcagcatgaattccggcaataacgggctcaggaaatcccgcagatggcgtggcagctcttccgtttcagtatttcccgccagtaccagatagctaacgagttgcttttcccctgatgcatttttataggcaataaccacggcttcattaacctgggggtggctcaataatttctcttcgatctcgccaggctcaatacgatagccgttgattttcacctgctgatcgtcacgacctaaatattccagagtgccgtcggcaaaataacgagccaaatcgccggtacgatacatacgctgatttttcgcaatgaaaggatcggcgctatagcgttcttcggttagcgcaggttgatttagatagccacgggtcacgccatcgccgctgatatacatttgtcccacggcaccgaaaggcacgggttttaactgattattcagcaaataaatggctgaattggcaataggtcggccaatggttggcagtgaatgggaagcgtcaatcagtgccacggtagcgtcaaccgtgcattcggttgggccgtacacattgaacgcggtaaagtgatttaacgctgacagacgcctccaggtctgaggagacaaggcttccccgccgattaacagaatcagtttttccacctgattaggcaaatcggagagtaataacatttccaattgggttggcgtgcagtcgaacacgtcaatggcattgtctttaagaaattgcactaaccgggctccatcaacgcgaacatcttgcggaacgatatggagctggtggccactcagcaggctgagcaggctttgtaatgaagcatcaaaggagatgctggagttgaggcaaacccttgattgtttagggtaatagtggaaaatttcctcgtttaacgcgtaatacaggttcataacctgcgcgtgttcgaccatcacgccctttggtcggccggtggaaccagaggtaaatatcacataggccagttgattaaccgaaagctgaggtaactgcagtggcgtatccggtgtatctatggcaagtaaggcatccacgtcataggtacggacatcactgctaccggctaatatttcctgacccaatgagtcaaccaacagcactgcgggttcggcgtcatgaagcacatcttttaaacgttcgctagggtaggcggggtcgagaggaacgtaacagccgcctgatttcagaatcccgaatagcgccgctatttgtaagcaactacgctccatgcacagggcaacacgcatatctgcctgaatgcctaaaccaattaaatggtgggcaatgcggttagccagcctatcaaactccagataagttaactgccgttcgccgtgacaaattgcgatggcatcgggcgttttttgcacctgttgttcaaatacctggtgaatacagctgtggttgttaaagtcgcattccctgtgattcagtgtctccagtagcagtaattcttcggctttaggaataaaattaatattgccaatagagcagggaaggttcccaatttcgacgctattttttaatccttttaatagatgactattaatttgagtgattcggttttcagctaaataggcggcattataaatccagcggaattgaccgtttaaggcattgatttgtaatgttagtagcgggaaactgtcgggatttatcctagagtgaataagaatgtcgccatcggtaatggccactgctaatgcatataaaggtttgttctgtaatagtttggtatttctcttcaaggtttcatggcgcagtacgatatctgtcgcatagctttgagcctgattgactcgctttatttctttattaagattttctgtaaaatcaaccaaggataattgatcacagatatcagctacatccatcggaacccaaggtgaggagagttgagaacagatatcttcgccctgacggaaggcgtgatagccaagctggaaactatgttcgccagaaaggctatgcaggtaagcggcaaacagaccgataattttcaaccaggagttatcgccggagtttggtaactcggaatattgccattccccaacggctaatctgctgcctccttcggtcttatcaagagaataagggaaatctaccgggttgaatctttgaagtttttccagccagaaaggctcatgcgtagccaaagtggccagttcggtagatagcgcttcggattgctgttggctcagaatcggtagccgatcgccagcggtcagatgaccttgttcggctaaggccgtagcgggaaccggggtgccgtccagcttgctgaaagcgctaattctgatatccgtagtagtggtcgttacctgccagccatcatttatgctatccagacgcaccagcgtgcctggggcgaataatgttttttctggtaaggtttcaacctgattaacgatgagtaattcattgttaattaatatttttaacttagttatcgcgggcggtacacctgccttttctgataacgccagtgccagattggcgatttgctgtgcatcctgtacctgccagttaataacggcggcggacagtgggtttcgcatgttttcaaacagcgttctgcgaggggaattggcccgcgcttccatgatttgacgatcgacttgcccaatggaattttgtggattggccgccagctgctcgaggataacgctgaatcgacggtggtggtcgaatatatcttccaggctgtgcagcctgtcacttccgtaaaagctgatggatagccctttaccgtaacctttatcgtcgaatacgacagaaaagccgtgggtttgggagccttttgcttttatccatttggtctcgcagtgttggaagggcgtaccgcgatcaaatagcatcagattaattgctgggccgaaactgaattcctgcttgttttttcgtaatatattttctccacgatagcgctgatgttttaatatctttgtcagctgcttattcatgtttctggcaatatccagaatattatctgtgggagttactgtaacttccagcggtaaagtattcgatgtcattcctatcaggtttttggattctttaccaatgcctgttaccgggaaactgaaactgagttctttaactccggtcaaggtatagaagtgagcagcgacggccgcaatataaatatgcgttggccttagattatttttctctgcaatgatctctatcgatttattaacagactcgtcgatatattgttcttcttttaatatactccgatcgttaggactgtgactaaggaatgaaagacggttagcattgctagccttctgcaagaaagtatcccaataggctttatccagagtgaagcgttttgactgtagatattcaatatcttttctagccagcaagtctggttcgtcaggaataatagtctccggttcttttccagagattaattcatcatatcggtcgctaatgcgttttgagatgagacccagactccgaccatccataaggatatggtggcagcgctgatagtaaataaatttattttgcggtaaacaaatcaatgaaaagttgagtaggttttcatcttctggcgaaatcaaagtagtgatatcagcctgtatccaggcgtccaaatcgaagctttcatccaaattatcagttttatcaattatatgtaaatttgtgtcaagagtgttatctacatattgatataactcgccgtcgatggccttgaagcggcttttcatcgcaggggtttctgcaacaatgccacggagtgctgtttcgaaaacagagatgtttaaatttccagtaatttccgcatattcggaaatattaaagggtaggtctggcgataattgctgtatcagccaaacttctttttgtcctaatgttgctggggagtaaacacagtttccgttattctgcttaatgctgtccatcttacttttccctactggataaatgccaatttgtcatattcatctgaaaatgaatgcggaaaataaatagcacaaatttattttattgtcacagtgagataatcaaactctaattattatgtcttaagaaactaaccttatgttttaaatgattttattttcagaataggcgtggtggacacccattatttgatttaagtcgagttcatcatttaagtaaatgggcggaagtctgttgatgctaatgaatcgctattcttatgacttgagacaatctttaacttgttagatatcacgtattaatctttatcttatttacgattaattagtatcctgataaattagtaaatgaataatatatggttaatatactaggtaaaaatatctacggtgataaattaattatttaacgtgtaatttaacttaaagaggaccaatccatgttggttggatatgcccgtgtctctgcggatgatgaaaaattgaatttacaacgcgattttttaaatcaggtagggtgcgaaaggttatttgaagaccatttcaacggagcaaaagtggaacggcccggtttacaacaagcactaaactttgttcgtgctggcgatacactcgtagtgtggcgattagatcgtctgagtcgttcacttaaagatctgattggaatgatggcattattggaaacaaaaggcatcgcgctaaaaagtattgaagatggtattgatacctcgaccagctcgggggagcttatttttcgactttttggcgctctggctaaatttgaacgtaatgtgatcaaggaaaggaatcaggcaggattaagggctgcgcgcgcccggggccgtaatggcggcagaccaaaagcgctgagtcaggataaacaggatttggcggtaaaactttatgatgagaaaaattataccgtggcgcagatttgccagatgatggggatctctaagcctacgctgtataaatatcttggtgccgccagaggtggccgcacggaataggatccatgtctctcggtcgatccttgcagcgttcagcggattgtatgttaggaattgattaattttaatcacgccttgatcaccgtagaaaccaagcgtcagatctggatacagggagggaagtcttggggcgcagatgttcgccccaatccaataaggaaagaatcagcctaataatgcgcagtttggcggtagacgacataagagtgccgcaggcatcacttcaattcggaactggctaccagacaggggttcgccatccagattgaatctgatgtcatggggtgcgctgatttccagccagggtagcgtggcgtcgatgacatttttgttttcttcgccgctgaacaggctggtcagcagtgcgggcagaagttcggtggccgtaagcagtcgcagctgtagtaagccgtcattaatcaatgcgttcggacaaagttcttgcccgcctccggcctgcttaccgttcccaattccgatcaccagcgcttcaccagaccaatgaaaatccgggccgcggatctcgcattgatcggcttttaatgtgtccatacgcattaaaccgtggacaaagtatgaggcaccgcccaacgccgatttcagcatcgcaggcgtttcggtagtaatgcgtgcgccaaatcccccggttgccatattgataaaataacggtcgtcattaactttagcgatatcaataggaacggcgcggccttttatcgccagctgcaaggcattatcgatttgcagaggaatactacaggcggtggcgaagtcgttagccgtaccgagaggcaaaatgcccaggctgggaagcgtatggccaggtggtaaagccgctaacgctgccgcgacttcattgatggtgccatctccaccgccggcaatcacggtatcgacccccagtgcgatagcctcgttaacataacgggcggcatctccctgttcccaggtggtacgcacatgtagggttaatccctcatctcgcacgttttttactgcattacgcacttctggatttccgccttctttaccgttgagaataagaaggctgggtggcgtttgagtcataacatgctccggaggtggtaggttatatcactaacagtaaaccataacgctttgctctgactatcagaatatttgagtaaaatcgcagaaaataaaaagtaagatcgggtaggttgattcctataaataggggatagcgtagagttattctggattagaattaaactggattcggagtattattacgttaattcgggttaataaattaagtgaaatttattgggttattagcgattattttaacgcgttaggttaattatttagtggtgaaaaataacttaaaattcaattggttaagaaattaaaaagaaaaggccggcccaagggagattgggccagccaaggaggtggttcctagtcttgctgtctaactattttagttctttattgtactcgagctatagtaccttgcagacattataatagatgtgatctatttctaatatttgtcaaaaatgccactcattgagtggcattagatattaagtctaaatactactgtttttcatgcggattacgcgtattagttccatccagattacggattagcagtgcatattccacatcgatttcttcgggaatgggcaaatacatgatatgtccatttcccggagcaacctcagcagcctggccttttttatccagcatgctttccagcgtaaactgaatattgccggttggggtcattaattcgacgctatctccgacggagaatttatttttaaccaccacttccgccagcccatcccgccggtcgccggtaaattctccaacaaactgctgccgctcggaaactgagtagccgtagtcataggtttgttggtcttcatggacgtggcgacgcaggaatccttcggtataaccgcggtgtgccaagccttctagcgtggtgagcagcgaaggatcgaaaggttttccggcaactgcatcatcgatagcgcggcggtaaacctgagcggtgcgagcgcaatagtagaaggacttggtacggccttcaattttcaacgagtgaacgccaagctgagtcaaacgctctacgtgctggattgcccgtaagtctttggaattcatgatataggtgccgtgctcatcttctgaggcggtcatgtattcccccggacgcatggcttcctcaatcataaagactttatcggtcggtgcgccgatacccagcgttggttcgacatttttcaccggaattggctggtgaatatgcacgatattgccgatatcgtcctgtttgccttcttcaactttatattcccagcgacacgcattggtacaggtgccctgattcggatcacgcttattgatatagccggagagcaggcaacggccggaataggccatgcacagtgcgccatggacgaagacttccagctccatttctggcacttgttcgcggatttcagcaatttcttccagagatagctcgcgggataaaatcacccgagtcagccccatttgctgccagaatttcaccgtcgcccagttaactgcgttggcctgcaccgacagatgaatatccatctgtgggaaagcttcgcgcaccatcatgatcaggccgggatcggacataatcagcgcgtccggccccatatcgatcactggtttcaggtcgcgtaggaaggtttttagctttgagttatgtggggcgatattcaccacaacgtagaagcgcttgcctaaagcatgggcttcctgaatccctaaagccagattttcatgattaaattcattattgcgaacgcgtaggctgtagcgaggttgaccggcatacacggcatcggcaccgtaagcgaaagcgtagcgcatattcttcagcgtaccggctggagacagtaattcaggtataaacatgggagattctcagtctgagttcaagtcagaaccacgccctggggagtggcaaaagccgatgattgtagcgccagaaaagcggaaaatcagcccttgcacaatttttgtagggtttaaatgatctggatcaaaatagccaagaagagcgcggcctgttactgccgcgcagtcgttagtagggtacaaattaatctacagcgtcaggtctttaatggtggtggtggggccgtttttcgttacagaggcaatgccatttttagctgcggcttcagaactataagattcgctgacgccgataacttgatgattcttggctttcagcacaaagtaaggttcatttttaacgttgtgctttaattcgtattgagcttccaggggagaattgctttggactgatgcgataccattttcagcggatgctttactggcgtacatctcgctggagagaataacttcattattgccggctttcagattgaaataatattgaccgttcttcgcttttttaagctcatagtagccgatggccatagtgtttctcctgttggttgagtagtctcctaatcagtgtagtcaacgctatccataatggagattcgcgtacctgactcagccaacataacgcacctttggcataaaatacattagagcaaacgacccatttcagcctcccagcggtagcccattccatatactgcgcggataaagggcttttcttcatcgaaggactccagttttcgtcgcagatttttaatatgactgtcgatggtacgatcggtcacgacccggtagtcgtcatacagattattcagcagttgttcacgggaaaatacgtgccccggctgcattgccagaatcttgagtaaacgaaactctgctggagtgagatccagggtgtgaccctgatagctggcgtggaagcgtgactcatcaatttgtagcggtgccatgtcactgggcatttctcgcgggctatagcagcggcgcaaaatagttttcacccgagccaccacttcacgcgggctatacggcttgcagatataatcgtcagcgccgatttccagcccgagtaaacgatcgatttcctcagttttcgctgtgaccatcacgataggtacatcggaaaaacgacgtatttcgcgacagatactgataccgtcgctgccgggcagcatcaaatccaacaggataatcgctggcggagcttgccgtaccgaggcgacgacttcagcaccattggtcacccatcgggtctggtaacccgcggcctgtagataatccaccaacagttgcccaagcttaggctcgtcttcaacgatcagtaccgggccatgttggcctggggcgaaaatagcttcattcatggatatttattttcctggtgaatgtgacaacggaaagtctaccttaatcaatacgccgcccaaaagtgaatgttcggcggcgatttttccgccgtgggcttcgacgatattatgacaaatggccagacccagccccgatccgccactcgctcggttacgtgaggtttccgcgcgataaaagcgttcaaagatccgctgtagctgttcgtcgctgataccgggtttgctgtcttgccagcacagcgtgagggcattgtcatcgagactcatgctgatattcagttgcccaccgttgttggtatagagcaggctgttttccatcagattatggaatagctgggtgaggcgatccgggtcgccgaatatcatggcctgtccgggtaagtgagttgttaccgtcagccgtttttcctcgatgcgacttcggaaactggcgagcgctacctgcaataaatgcaccaaatccagctgagttttacggtaagccagtgccccgcgatcggacatggaaagctgatgcaaatcgttgactagtttggttaacatcgccacttcggcttgcaaggaactgagtgattccggcgtaggttggcgaacgccgtcctgtaaggcttccagctcgccgcgtagcacggccaacggcgtccgtaattcgtgagagacgtcggccataaagtcgcggcgcatttgctcatttttttccagcgagctggctaactgattgaaatcttgtgccagtcttcccagttcatcgcggctactgacggctactctggtgctgaaatccccggcagccagtcgatgggtgccttccaccaaacgttttaccggagccagcatcccccgcgaaagtagccaggttacggcggcggctagcaaagtggagagggcgacaatcatccaactggtacggcgttgttgcaggtcaaaattgatatcggcatcgcgagtgagtttttccgagggggtggcgatcacccagccgacgatctgatcgtcatattttatggggaggcgtgaaccctctttaggcactgctccggtgtggccaaccaacagcttaaagtgactgtctactacccaaaactgggtgcgccagccgcgtggcggaagattatggctattatcgctgttttgctcgaaggatcgcatgatttgatacaccacacgatcgttattacgcaggaaattccaattgccgtagtgcttgtattgttcttccaatgcgtcacccagcatggcgatacgttgctcattgctgtgcttgatataatcgataaaaccgcgctcaaagctagcacgcattccccaatgcatggtgattaacaccaacatacaggtggcgaaaatcgccataaataacttactggtaatgccaattctcatgctgtcctcatttctggcctgttgtatccagagtgcggtttttacgaatatcctgcggtactttggcaaagattaacgccggtaaggcaatgacaatcgccatgcagagatagctgtaaaggaaggcgctgtgggtcgccggtgagttagtgacgacctgattgtgggcaaacataccgagaacgatcccggcgatgctaacgcccatactcatagccaactgcatgaccatggataacagactgtttccactgcttgccagcctgtcgggcaagtctttcagggttagcgtattcatagtagaaaaccgcaaagcgttgagcattccctgaaagaataaaaccactggcagcagccatagccagcccatcagagcgactaacgggaagctcaggctaaccaccgccagtagcagagtggcactgaccaatacctgacgatagccgaagcggttaaccacttgcacgataattcgtttaattcccatgctaccaataatcatgggaatcatcatcagaccagcgtggaacggagtaaaacccagaccaatctgtaggaaaatcggcgtcataaaaggcagcattccactgccgatacgccccgtcatactgccaattagccctaaagtgtaaactttattcttgaacaatcgcagcgagaatagggctgaaggattacctttggcgtgccacccatagcccagcagcgccagcagcccgcaaataattaatccaacaatggcggcggggtgcaggccaagtcctttatggccgtcgagcgccagtgtcaacgtagccataccgactgccaacatcaaaaaaccgctgatatcaaaccggcgagtttgcatggtgtaattaggcattaacatcagagtggcaatggcgcctatcaatccaaccggcaaattaatcaggaaaatccaatgccaactggcgtactccaccagaaaaccgccgagcgctggccccatcagcgggccaacctgtccaggcagagtcacaaaggccatcgccgccatatattgttcgcgtggaacgattttcatcacggttaaacgaccaactggcaccatcatcgcgccgccgataccttgaatgacgcgggagaaaactagctcattcagggacgcggatcgagcgcacatcagtgagccaatggtgaacaggataatcgcggagaaaaacacccacttcacgccaactcgatccgccagccagccgctggcagggagcataactgccacggtcagcacataagaaacaaccaccgactgcatacgcagcgggttttcccccagactggcggccattgacggcaacgcagtgttgacgatagtggtatccagcgcctgcatgaaaaagccaaaggcgacgatccacaactgccagcgaaccgacgtggaccgaagcggcgttagcgtttctggggacatattactcaatcctctgtaggggctgacggctaaaacggctgcacaggcgatcgaaacacaggtaaaccgccggtgtagtataaagcgtcaaaagttggcgcataatcaggccgctaacgatgctcatccccaaggaggggcgcagtttcgcgtcgtcgccgcagcctagaaccaagggcaagacgccaaatagcgccatcagcacggtcatcataatcgggcggaaacgtagcaaactggcctgaaagatagcctctctggcattgagattgccgtttcgctgcgctgccaaagccaactccaccatcatgatggcgttatttttcactatgccaatcagcaacataataccgatcagggctttcatactgaaaggcgcgtcaagcaccgccaaagccaacaacgcgccgacgccagcggaaggtaacgtggacagaattgtcagtggatggacgtaactttcattttatccagcgaactgacgtcctgcgtatattgccgggcgacttccatcacgactttgtattgatttaacggctgataatgataaatagtggagatctgtcgttgcccaaaagcgttatttagcaatgtattggcatcggaaacgcgggtgcccaagcgcgccagcctttcacgatcgacagtcagccccagcttggcacctttgtgttgttgagcggcgttaacgtccgccagctctggcggtttggcaaatgcggcgcgaattttggctccccagatgcgccaagcgctcagaacgcccacctgtaaagtgtcgtggttactggcgttagattgcctgccgccaatgcggatatcctgtgctgcggctaaaaacaggctggctcccggctctttggtaccgcttgcttggccgccggtgtgaagtggcgccagacggtaatggcgataatcacgacggccaccagatctgccagaattaccgagcgggaagtgcgtataggtttggcattcatagtggcgaaggattctcttttatgcttgtgattttacgtggagacgatccgtaataggcgttagccagataacttatattttattagtttagctgtcttttcacggagaataatgaaggaaatatggaatagaaagctgattcttttcagttttgtctgggtaacgttctgttttgtaaaaaatacggcattttaaaggatggcggcgcggaaaaaagccattgtgtcaatgagtcacggaaaggaagaaggctgcggataggtgtcaatgaggcaggaaataaccgttagttaaccggtgcatcctgcctcaacacattcactatttttaacgatacagcgtttgcgcccagcgtgccagaccagcggtaacggagccaaaatcattgcccccaaccagcggaatgcccggtaactgttgctgtagtgcgctgcgtaacagtggtgaacgggcgctgccgccggtcaggtagatcacgtctggcttgacgttgctggtggacagcgccaggttgacttgttcctgaatgcgttgcaacggctgagtgatggcatcggccaattgctgctgactgatcatttgccccaactcaggtttgacgaagtccagcgccgtggcgatctgctcgtgctgagacagcgcaattttgctctcttctgccgctcttaccaaacggtaactcaaacgctgttggtagactttcaacagcatttctacctgttgcgggttagccgcatcgcgaatcaaatcacgcaggaaacggccgttggccgtgctgtagaaatcgctctgcgccggaacatcgttggtggctaccgcattccagtaaggcaatgaaggcattgcgatgcctttttcggtttcgctacccataccaaacagcggcattaactgtttaaacgccagcatgatgtccagatcgttaccaccaactcgacagccgctgtgacccagcaggctttgctgacgatccgccatgccctgccagtttggtcccatcagtaacaccgaacagtcggtggttccgccgccgatatcgacgaccagcacggttttttcttcggtcagcgtcgcctcaaagtccagaccggcggccaccggttcaaattggaaagcgatatcgcggaaaccggcacgctgtgcggcgcgcagtaaaatgccttcggcctgacggttagcgtcttcgccgccagagccctggaagttaactggacggccaatgacggtctggctgatttcggtttgtacggcagattccgcctgacgtttgatgtggaacatcatggcgcagaccagatcttcaaacagggcgatttgctgaggttttaaaccggtcgccccgaggaaggatttgggggatttaacgaagtaaacttcttccggatcttcgatgtattgagccagcgccgacaggccaaaatgcaggctgtccgcattgactggaatatcttcttcacggttaaaagcgatggcccgccgtaacaactgttggttttcatcgctgccggtgggcacctgccagtgacgatgcaggcattcacttaccgcctctcgcgtgggcgcgcataacatggaaggcaaataaacgtcgttattttccaataccagcagttcgggagcatcgtcccgcattatggccacagaacagttcgccgtgccgtagtcaaaaccaatgaacataattgctcccaggccaaataaaggggggcgactttaccttagagtgcgcagaggagcaatcgacaaatcagagtcattggcgggaataattcgggtatcggttcaggttttctctaaatgacatttttgaatctgccgtaggctatttattgcttaaataaccgcagcctaaaatatcggtcagacgtgcggtgcgggcaatactgtcaccgtcgaccaaatcgacgccaatatgactaagtttatccaggatcgccaactgatcggcaggccccgcgagggttttgaccccggcttggtgagcggcgccgttgataatcgagaccatcacttcgtccatttgattggtatgaatattggcgatcagaccgacgtcgagttttaaataatccatcttgaggtgatttaacctactgaaaccattcatgttggctgaaaaatccgtcaggataagtttgccgcccagcctctgcaggcgagtgataaaattatcgatagtggacgaatggcgcagcagcgtagattcctgtatcaaccaatgcagatcggaggctggaatgacggattgttgcaggctatccagcaaaaagtggcgaaagctttcttcctgtagcgattcttcggataaagccacggcgaccttgagcgccttactttgaatattttcgccctgtatacataacaattggtggcagatccatttatctacctccgggcgcaggccataaagcaaggaggccgagagaaaatcgtcctggctcacggcctgtttgtcattcgggataaccgacgggaccagttggtagaaagccacgttattcggtatgagcggcggagcggcggcggtagccaaaagctctagctgattctcttccagaatatgcagaatttcatctttgctcagtagctcatgctggcgtgccaacagctgtttttgccgtggctggaagagatacacctgcccacgaccactgtgtttggcggtatagcaggcaatgtccgcctgctccatcagttcactacgcttgctgttttgactattgatttgggttataccggcgctggcgccgatacggtattgcttaccttcccagtagaacgggtagtcattaatcagcgaaaccattccctgcaccacggttttagctctggtgacgctgcagttttgcagtaacaggccaaattcatcgccgccaagacgggcaacgcaatcgctagtacgtaaatacttacgcatcaacgcgctcaattctgttaacaacgcgtctccggcggcatgtccggctgtatcgttaaccgctttaaagcgatccagatcgaggaagcctaatgcgtgctgttgattatgttcgatgcttttttgaatcgcatttttcagctgatactcaaaattcgcgcggttaggcaagctggtcagattatcgtgcgaggcgctgtagctgagtttacgcatcatttcgcgcgattcgctgacgtcctggaagaccataacggcaccgacggtttccccttccaaggttttcagcggcgcgacggaatccttaatgtcataacgttcgccgtcccgattgtgcaaaatcagcgaaaggttattttgcggcggtgaaaccccgttaagacagtaccagaccggattttccacgtttaaaccggtgctgctatcggttaagtgaatgatttgatcgataggttggccaagggcgatggtattggcccagccggtcattttttctgccaccgggttcataaaggtaatatgcatttcccgatcggtactgattaccgcttcaccgatggcgtccagcgtgatatgcaggcgttccttctcttcgtgcagggcttctgtcaggcttttcacttcggttaagtccagcgcagtgccgattaaacgcaaaatatcgcctcgactatcgcaaatcatattggcctgattacgaatatggctgatttggccgctgcgagacacaatgcgatattccaatcgatagggctgacagtgagtcagcgccgcggcaaattcgcggtcaatgcgcgcacggtcgtcgggatggatgcgatctcgccatgcctctatgctaggaatcgtattcggcggcagatcatacagttcgaacattcgtttatcccaactgatggtgttctctttcaggttccattcccaaattcccactccaccggcttcattcgccagggtaatgcgttccatcagccgacgattgaccatttcggtttttttcaggtcattaatatcttcaacctgagaaataaaatagagcggacgctgctcgtgatctcgaaccacgctgacgaccaatagcgcccaaaccacttcgccgtcgctgcgaatatagcgtttctccatggtgtagctggggatcacgccgtcaaacaggtcttccaatagcttgagatcggcggtgagatcttccgggtaggtgatttcctgaaaggttaaattgagcagttctccttggctgtagccgagtaaattgcacaaggctttgttgacctgtatccatttaccttccggcgacaccagtgccataccgatggccgaatattccatcgcgttccgaaaacggttttcgctctcgataatatgatctttttcagtgcgaaacgcgtgcatcaccatcgacatcgcgtgtggcggcactaacaccagtaatagcggaataaacgtaaaagcctgaataaatagctgaccgctcacctgattggtgaacagattgaaattaatcatcagcgcaatcaataccgcggtgagacagaagatgataaatgcttccaatcggggcagccgaatagcgacccaaatcagcgccatcacgatgaaagtaaaggggaagggtaggtaagtcagcgccagataacagcaagttaaagataaaattagcatccagatcatttcaaacagagtttgcgatcgcagggatgatctgaaatagccttgctgataaagcaacccaacgggtgccaacgccaatatgccaatggattcagacataaaccaaagggtgaatagctggccgaaatcgcggtggtccggagccagataaaatgctgccgcgaagccgctgagtatggggatcagcaaaactgccgtcaaaacaaatttaagccagctaaacaggctgtgtagcggatctttcggcattaacaggcggcgtagcagccaggcaccggcgatagactccaccagattgattagtgtcaaagggacagaaaaccagctagggccgtagagcgtgatattcgccagaataatagccacgccagcgacaagcagttgcagcggccaataacgtaaccgcagatgaaataaagccaccatcaaaatagcggtagggaaccacagcggcgcgaggttacgtgaagtttccgacagttggatgcaaaaaagcgcgagcaggtaaatcaggccgctgataagcgcgatgttcagaagaacatgatatgaatgatttcgtgctatcgctctgattctcatggcgaaccttatgtgtaacctgcgaattgccagcggcataggaaaaatgccgctggtttttgaatcctagtacagaagggcgatactgaccattgttccgcgcgttatcatggttgatatcgccgcgagaataagccctcgtttcacatgggttcctaaaaatgatagtgagatcagaccaaaaataacgttgccagaccgaggaaaataaagaaacccccagtatcggtaatcgcggtgatcatcacacttgagccaatcgccggatctcgccccagccgcgccatggtcattggaatcacgacgcccatcagtgccgcaaccaacagattaagcatcattgccagcgtcatgacgccgcccatggctaaatcgccgtacaggatataggtcacaatgcccataataccgccccatactatgccgttgatcagcgcgacacccagttctctcatcatcaggaatgaaatgttgctgttgcctaattggatatggtgcaacgccagcgcacggacaatcatagtaatggtctgattgccggtattgccgccaatgccggccacaatgggcatcaatgctgccagtgcaaccaattgagaaatggtatgttcgaataaacctattactcgtgaagcgataaaagcggtgcacaggttaatggccaaccaggaccaacgggtgcgaaccgcgcgtcctaccggagagaacacgtcttcttccgggcttaacccccccatacgacgtaaattggtgtcgctttcttcattcaccacgtcaacgatttcttcgatggtcagtcgtcccatcagcttgcctttggcgtccacaacggcggcgctgatcaagtcataacgttcgaacgccccggcggcgtcttctgccttttgttccggctggaaagtggtcggctcactgttcatcactttgaacacctgagtatccggtgagtgcagcagaatggtggtgaggggcaattcgcccagcagcgtattcttccgatcgatcacgaaaattttatcggtggcatcgggaatgctcttacgatagcgcagatagcgctgaacggttcctagcgtgatgtcggcacgtaccgtgaccagctcgaagtccatcatctggccgacggtatctcggccatattgaatcacttcccgcactcgcgctcgttgagccggatcgagtgacgtcagcaagcgccccatcaggttgcgcggcaggtattcggccaaataagcctgctcgtccacgtgcagattgcgcatggctttcagcaggtctttatcgctcatttcttcgatcaggctgtcccacaccgtttcggaggcttcaaccagcgtatggccgcgagagttgttatccaccagacgccacagcgccagacgttcatcttgcggcaaagcttccagtaaatcggcgagatccgcggcgtgtaagtcggccagcaaatgcttaatctcggcggtttgatccagcaattgttcatcgctgagtttttcccgatcgtccaggcgaccgagaataccgtcaaccagcgctttattattcagtaatagcgaaagaatacggtgacgaatagcggccagttttttagcgtcaaatttggcggacgttgggtgctgatgtacgtcggaaacggtaggggctgacatagtggtccttaactcaatgcattatggggggataaccccgctttttatttgttcgcgtcatgtcagggtgacagaggtgttcggcaaacggtggccgctatgcagccaaaatttttgtcacggttatttatgattatgggttttatccgcgtagcgcgattcgccacgctcaagactgtgggataggtaagaggtctgcggcagacatcttacctatcttaagaggcaaatcagctattaaggcgttaaatcaggctgaggcggcgtgtattcccgatccaccggttgctcaatctgttctgattgattacgttcctgatgatgaggaatcgccgcgattgccgcgtaaagtaaacggccaaacagaatgataaaactgaccagtaatatgattttggttaactgcgtcgattttttgtttctcatactcgtttttgcactgtgttgtccgttagagataagcatcaggggccagctgcgacccctgaattcggagagcatcggcgttaatccgtctcgttttctgcttctggcgcgtcttcttcctcgataatcagcttccagccgattacgtcattccaataagcctgttcccgttcaacatcgagctgcaccagactgttttgtgaaaagtagccgtaagggaagcgcagagtccaatgattatcatcggtgatcagccgtaagctttctggcttagtggtggactggcgttggttgttcagtaaggcacccaagcgtagcaactggatcagcggcaggtagtatttctttttaaacaggttaagacgcggtaattcatccagtttcatggctttacgatggaatcgcaccagtgacgccagtaataattgctgttcctgattaaagcccggtaaattggtgttttgcagaatataggctgagtggcgatgcattccgctgtgattgatactcagcccgacctcatgcagcatggcggcccatttcaacagcgcttcgagctgcggctgcaccaatttagggttttgctccatccactgggtatagagtagctcggtggtttccagcacccggcgcgcctgttcgcgatcgatattgtagtgatcggccagactttttgccgtccgctgacgaatatcctgatggcggaaacggccttccatttcgtacagcacgccttcacgcagcgcaccgtcggaaagacgcagatctttgatcgctaacgcatcgaatacgccgcacataatcgctaaacctggcacaaatactgattggcgatcttcagataaacccggcaggctcagcgcgctaaactgcttgaattgcaacacctgctcaaccagcatttccaaacgttctggcgtaatcaaaccgtctttttcacccatttcgaccagcacttcatgggcggctttaatcgtacccgaagccccaagagcgtactgccaaccttgaatgcgatattgccatgccagcgtttccaacttttgcgccgctgccagacgagcgcgcttaaagttagccttactgatttcaccattcgggaaaaattgctgagcgaagctgacgcagcccatgcgacggctttctgccaatagtggttcaaaatcttcgccgataaccagttcggtcgagccaccgccgatatcgatcaccagtttgcgacctttctccggctgagtgtgttccacgcccataaaaatcagacgagcctcttcctgaccggaaatgatctcgatcgggtagggaatcacttcggcggcgcgtttcagaaacacttcggcgttggcggcctgtcgcagggagtgcgtccccacgatacagacgttatccggcgagaaaccttgtagccgttcggcaaatagagccagacaggccagaccgcgttccatcgcttcttcgctaagaatattgttactgtctaatccatcagccaaatgtacgcgctgttttaagcggcctaaaacctgaagtgcgccgttaacgacgcgggcaatcaccatatggaaactattggagccaaggtcaatggcggcaatttcctgcggtttagtggtggagttactggttagcggcatagttttaggcctattgctctggttgttccagcgcttttaaataatcataaatggcaatctgtgcacgtactttgcgccgatttccgcgcggtacataacgattactcagttctttatcaatataacgggcttttaccgtgtcgttgaacagtagctctaagatatccaacactcgctgtttcagtttcgaatccagcagggaaacggccacttcgatacgataatcaatatttcgggtcatccagtccgctgatgagagataaaccagcttgtcgcctttattctcaaatacgtaaacgcggtcatgttccagaaagcggtcaacgatgctggtgacctggatattttcactgatgcccggcatattggggatcaaagaacacattccgcgtaccaataaacgaatcttcacgccagcactggaggcgctatataaccgatcaaccagtcctttatctactaaattattaattttcagcgtgatcccggcgctttctcccgcctgtgcatggatgatttcctgatcaatcaattgatacaacatcaggcgcgagttttgcggtgataccatcaaattgtcgaatttaactggcctataagggttctcaataaagttaaatacccggcgaacctcattggtaatgcgtgcatcggcagttaacagcgagtaatcgctataaatacgcgcggttttctcgttaaagttacccgtccctatatgagcataacggacgatttggtcgccttccaggcgggaaatcaggaataatttggcgtgaatcttcagccctggcgcagagaaaataacgtgtacgcccgcggcggtgaggcttttggcccagtgaatgttggcttcttcatcgaaacgcgcctgtagctccaccaccaccgtgacttttttaccgttatgggcggcgtgaatcatagattcaataatgcgtgagtctttggcgacgcgataaatattgattttgattgccagcacgctggggtcgaaagacgcctgacgcagtaattccagcacgtgttcaaaggtgtgataaggataatacagcagcacatcctgctcacggatcgcgtcaaaaccgttgcggaatttatcaaaccaaatatggcgtaggcgcggcatcgggcgattcaccagattgcttttccctacgttagggaagccgatgaagtctttgaaattgtgataacggccaccggcaatgacggagtcatcattggaaataccgagtttatttcgaagtaattccaccatttcatcgggcatatctcgctgataaacaaaacgcaccggctcggcggttaaacgctgcttcagactggatgacatcaactccagcaggctggactccatttccgtaaccagatcgtattccgcatcgcgggtcattttcatcgaataagcgttgagcgcatcgtaatcgaagaagcctttaaagatttcatcgagacaataacgcagaatgttatccaataagatcattggcttgcgacggcgcggagcttctggtggcaaattaacgaagcgcggcactttatcggaaggaatttccaacagcgcataggcgatttcctgcccgcggataatctcaaccgccagataggtgtaatcgtctttgagaaattgcaccagattggtgtcgtgattgatcagtatcggcgtaatgtgctgacgcaaatgctgtttgaaatattgtttgagccaaatctgctggttctcagaaatctggcgttcattgatcaggaaaatctgattccgcgccatttccaacagaagttcgttatacaggctgtcgaattcctgatcggctttgaccactttggcctgaattttctttagcaaatggcgagaggacacgccagagccttgctcttcgctaataagaattcgccgctttaagtcggcaaaacgaactttataaaattcatccagattattggagtaaatgccaagaaagcgcatccgctctattagcgggttgctcttatccgcagcttcctgcaatacccgttcgttaaaggataaccagctgagttctttctcggtgtagagcttttcctgacccattgcaactccattcagatttttgtgggagtatttagtgtccgtagacattattgcgagagattgacaggaaagtccaacagatatcattagttaacattgtcatgcaaacgccataaaactgacataagatgctcggtcatctcagcgcgcaagggcgaatgagttatataaatcatctataggatctagtgtagggcatggggcaaagcagagtagtaccactttcaggcagagatcgccgccgggctatgattgaccgcgtggtaggcaggatggtgagcggtagcggcctgctggtgctactgaccctgatgctaatttttgtctacctgctgtatgcggtgctgccgttatttaaaccggcggcgattagcctgcacgctcaatttcccgtgacccccagcgcctccaccttaagtatgggaatggattcccgaggggaaaagctgtggcgcatcgatgctcagggcaacggcgcttttattcgcctccagccggaaggtgagcaggctgaagggacgttactggcaactcaggtactttccgctcctcctacttcattgggacaggcttcgggattgcaggcgttgggattgagtaacggtagcctgatattggttcggccggattttagcggcggcgctcactggcatttccctttgggcgatcagccgcagccgctggatgaaaaaggacgtccgttgcgacatatcgccgtagcggagccacaatcacagcaattcacgctggcagccagcactgatgacgggcgggttttgctcgggaatttcactgaaaccgaacgaaaaatcacgccgctgccggaatccccgacgcggatagatcaactgttgttaagtcccgatggccactggctgtacttactgtcagcgacgcaggtttatctttaccagttggataatcgccccaaactgcgggaaatagtcgcgctggatcagcaggagccgctgcacttagcgctgttagctggcgggaaatcgctattggtacattcgccgcaggggcgtttgtctcagtggtttgacgtgccacatacccgggagcctcaggataaaccgccacatcttactcgtattcgcgagttctcttcggcaatggggctgctgagcgtggaagatcaccgccgggtttttgccacagtgactccagcgggagagttaacgctattttccagcattcaaacctctcctttattgcaggaaaaagtggctaaaggcatcagtcatgccgcattttccccgtggggtaacgcactattgctggaaaacggcgctaactggtcttattaccgcgttgataatgcctatccggatatcacctggcgcagcctgtggcagaaagtatggtacgaaaactacccggaacctgcctatgtttggcaatctacgtcggcgaatgataattaccagcctaaattcagcctgatcccgattatctttggcacgctaaaagctgcgggttacgccatgttattcgccgtgcctttggcattggccggtgcgatttatactgcgtattttatgcagtctggactgcggcgagtgattaaaccggcgattgaagttatgggagcattgcctacggtagtgattggtttgattgccggtatctggctagcgccggtgattgagcaatatctagcgggcattctcctattaccgttcttactggcgctggctattctgctgtgcggttggagcagcgcaaaactatctgagcgaattaaatggcgcctagctgccggttgggatgttgtggtgttgctgccggttattttagtcactggctggctgactttgatgctggggccgcatttggcacagtggacgctcggcttaccgctcaatgaatggctgggagataattacgatcagcgtaatgcgctggtggtcggcatagcgatgggctttgccttaattcccattattttttctctggcagaagacgcgctgtttagcgtgccgccgtccctgactcaggggtcactggccttgggtgcgacgccgtggcaaaccgtggtgagagtggttctgccttcggcctttgccggtattttttcggcgttaatgattggttttggccgggcggtgggggaaaccatgatcgtgttaatggctaccggtaatacgccaattattgacggcagcgttttccaagggctgcgcgcgctggcggcgaatatcgccatagaaatgccggaggcggtagtgggcagcggccattatcgggtgctattccttaccgctctggtgctgtttatgttcacttttgtggttaataccctggccgaagcgatacggcttcggctgcgggaacgctatcaaacggagcgggatgcgtgatgaaaagctggtttaaatcaggctcgccctggatctggctgacggccggttcggtcagcatcagcctgttggccttgctgggtatcatattgttgctggcagggcagggaatgcgttatttctggcctgcgccggtttatcagttcgagctgaaacaaagcggtgccgggctggtcagcttgatcggagaaatctatcagcagcagcagatcacacgggaacagctggcaacggcggggattcctctagcggacggacgtgattctgtgacgcgttatctgattaaaaccggtaatcgggagtttcaggggcacgattttcagaccttgcttgacagcgatattgtacagcggtgccagccgaaagatttgctggtgcttagccgtttgaatcacggtacagcctacggttttatggccgggatgctggataacgggcagccgctggtgggggataatattccgctggagctgcaaaaacggatcccgcaggtgcaggcgttggtcaggcaaggggatgatattcagttccgccagatgaacatacttaaccaacaggttgagaatttgcgtttgcaggagaaacatctgcaaaccgccggtaagctggacggacgagcgcaagatcgcctacgcgctgaacgcggagaggtacagcgtcattacgatggattggcgacaactttgcagggcctgcgcgcggaacaaaaccgctatacgctgttgctcaaagatatgcagggtcagatacacccgatttccctcagccaaatcagtaaagcttggtatcccaacaatatgactttctggcaaaaagtcaggcatatggcggggcagggacataaatttctgaccgacagtccgcgcaatgccaatagcgaaggcggcgtattcccagcgatttttggcacggtgctgatggttatattgatgtcaattatggtgatgccgtttggggttatcgccgcggtttatctccatgaatatgccaaacgcaattggttaacgcgtacaatccgcattgcggttgtgaatctggcgggcgtgccctctattgtttacggtgtctttgggctgggcttcttcgtctattttatcggcggttcgctggataagttattttatccggaggcattgcctaatccgacctttggcacgcctggcgtactgtgggcggcattaaccttggcgttactgacactgccggtagtgattgtttctaccgaagaagggttatcgcgcatacctgccagcctgcgtcaggggtcactggcgctaggagccagcaaagccgaaacgctgtggcatattgtgttgccgatggcggctccggcgatgatcaccggcctgattttggccgtggctcgtgcggcgggggaaaccgcgccgctaatgctggttggcgtggtgaaatccgtaccggtattgccggtagacggtgtattcccttttctgcatctcgaacgaaaattcatgcatttgagtttccagatatacgatatggcattccaaagtccgaacgttgaagccgcgcgtccgctggtatttgcaacggcgttactgctggttgttattgtggttgggctgaatttagccgcgatgggaatacgccatcatttacgtgaaaaataccgtggcctgatgctgtaatgacattatttaactcgcaggaaaccttatgggactgatgataccggacgccttgcccgtactggatgtacggcacctgagcgatgaaaataccgcgctggcggtagagcatctcaatctgttttatggtgaaaaacaggttttgcacgatgtttctctgcgtatccctaaaaatcgggtcactgcgcttattgggccttccggttgcggtaaatcgacgttattgcgttgttttaaccgaatgaatgacctgttggaacattgtcgaatggacggcgaaatcagaattggtgctgaaaatatcatcggaaaaaaggtcgatgttgcggcgctgcgccgtcgtgtgggtatggtgttccaacggccaaatcctttccctaaatccatttatgagaacgtggtttacggcctgcgtttgcaaggaattcgcgacagacgggttttggatgaagctctggagcgtgctttacgcgccgcggcgttatggcacgaggtgaaagatcgattgcgggagaatgctttccgtctttccagcggccagcaacagcgtttggtcattgctcgagcgattgccatcgaaccggaaattttactgttggacgagcctacttcggcgttggatcctatttcgaccttgaccatagaagagttgattacttcgttaaaacagcactataccgtggttttggtcactcataacatgcagcaggcggcgcgggtttcggattacactgcgtttatccatcaaggttgcctagtggaatacaacgataccgatggattatttacctcaccggccatgcggcggacggaagattatattaccggacgttatggctaagattcgattggttaggattatctgcgcaaaataacaccggagcccatggctccggtatagcggttaaggcgttttgatcgccggagttttatattttgtcaaatattggggttggaaaatacacatacggataaccgtgcggtattcgccgttgataaagaactcgtcgattaactcgccttcgcttttaaagcccagcttgctgtaaatgtgaatggctttttcattttctttatcaacaatcaaatacagtttatacaggttcaatacggagaaaccgtactccattgccagtttggctgcggtgcctgcataaccttggccctgatgggcgggatcaatgatgatctgaaattctgcccgacggtgaatatggttgatttccaccaattccaccagcccgacttttgtcccctgactttcgataataaaccggcgttcgctctggtcatggatatgtttatcgtacaggtcagacagttcaacaaaagcctcgtaaggctcctcaaaccaatagcgcataacgctggcattattatctaactgatgaacaaacggcaggtcatccctttccatcggacgtagcctgacgctggtagtgctagacatgcggattcctcgaaataataaataaaacagcggacgctgcgagggaattataaccacatagggcgtgggagaggagatattcctttagatgttggggtaaggtttatcatcaataatgatttgagtctctactgacggcgtaccgcgattcgttcccgctcaaacgcggctcgcttgacgaggagtgtacgagaggcgttttcagacccccatttgcgcgccaaccttgctcgggaaccgttatggcgagtgagaataaaccgaaagatttagctttcgcaacccacaccaatcttgtcgtggaaaagctcaaatacgttctttaaagtcaaaattagttcacagctgtaatcggagcaagttccggttgatattcgataagtgaataccttgttctatggtttaaactgactcattgccttgaatcaagcaataaaccgctttcctgccatcagccattgatcctgctaagctttcaatgatgctcatccatttttaactgaaaatgattggataaatacagccagtattagctgataaatctttaaggggacagaggtgattaaagctttttctcaagaaataaccaaagcggtagttgatccagtggttggtattggtattgcggagttggcgaaagggaaggcgctgaatagtttcggtacgcgtatcgcagcgggtaaaaaggtgggatgccatgcccattttcacggcgaggagtggtatatcattctggctggagaggggcgaatgtacctgggggatgtggaaaaccagaagttggtaaacttaagaaatcatgatgttaagcaaggggatatcttttgtataccgccgggaacagcccatcagttacaggctgaatcgcaactggatttaatctttttgtgcccaaatagccatctggtgacggatagaatactgttccccgatatgtgctaacccttgattaccggcggccagaaaacaacattggaacgttgggatcaaaaaagggccatatcacatggcccttttagcataaaaccggcagtagcttttattcgtcggctgcgtaaccctgtaagggcagctttttaccatccaaccaggcggcgttctcacgcatttccaatcgtccttcggtaaaccaactgaccaccaacggatagatattgtgctcctgcgcctgcactcgctcaatcacatcatcttcgctatcttcagaaaaaatgggcacttttgcctgtaagataaccggcccgccgtccagttcctcggtcacgaaatgcaccgaagtgccgtgttccgtatccccgttttcgatagcctgacggtgagtgtgcaaacccggatacttaggcagcagcgatggatggatattcagcattcgaccagcgtaatgctgtacgaattccgggctaaggatgcgcatatagccagctagcaccagcaaatccggctgataggcatcaatagcctgagccagcgctaaatcaaagctgacacggtcagggaaagttttggcatctagcgcatgagcaggaatcgcggcctgcgtcgcgcgctccagaccgtaagcctgcggattattactgaaaaccgcacaaatcgtacccgccagtcgcccttgttgctgtgcgtccatcagagcttgcagattgctgccttgaccagaaaccaaaaccacgatttttttcatagaagctaccgctatccgtctttttgttgatccgttacggattgatgacaacctgctctgctgcttctggcaatgcagcaatcgtaccgattttccatgctttttcgccggaagcggtcagcagttcaaccgccttatctgccagttcggcaggtaaggcgacaaccatacccacgccacagttaaaggtgcggtacatttcgtggcggctcacgttgccggcctgctgcaaccagctgaatactgctggccattcccaactggattcatcgattaccgcctgcgtgccttctggcagaacccgtgggatgttttcccagaagccgccgccggtcaggtgggcaatggcgtgaatctccagttgctcgatcagactaaggatagattttacatagatttttgttggttccagcaaatggtccgccagagatttgcctgccaagtgcgtttgctcaggatcggttttactgacttccagaattttacgtaccagagagtagccgttggaatgcgggccgctggcgcctaacgcaaccagtgcgtcgccgggagccactttgctgccgtcgataatttcggatttttcgacaacgccaacgcagaaaccggcaacgtcgtaatcttcgccgtggtacatgcccggcatttcagcggtttcgccgcctaccagcgcgcagccagactgtttacagccttcggcaataccggtaatcacgctggctgcggtatccacatccagttttccggtagcgaaataatcgaggaagaacagcggctctgcgccctgaacgaccaaatcgttaacgcacatcgcgactaaatctataccaatggtatcgtgacgtttcaggtccatcgccagacgcagcttggtgccaacgccgtcggtgcctgaaacaagaataggttcacggtatttttgcggtaatgcacacagggcaccaaatccacccaatccacccataacttccggacgacgagtctgttttactacgcctttaatgcgatcaacaaggtcgttgccggcatcgatatctacacctgcgtctttatagctgagagaggttttgtcggtcactgcgaggtccccacggaggttggctgtttgagctttggaagaaaacgcggcaattctaacagtctaggcaaacgtttgcgagtggcttgtgatggagtcgttgttttccatgttctagaattaagatccagtttctattgatctgaatcaggctattggttgtggcgttcaaaaaaaaaggcggtataatctcgcgatttttttggccgtcaaccgccttaataggagaaaaataatgaagatcgttgaggtgaaacacccgctggtaaaacataagcttggcctgatgcgtgaaaatgacatcagcaccaaacgcttccgtgagctggcttctgaagtgggtagtttgctgacctatgtggcgaccgccgatctggaaaccgaaaaggtcactattgatggttggaatggcccggttgaaattgaacagattaaagggaaaaaaattaccgttgtgcctattctgcgtgccggtctgggcatgatggaaggcgtgctggaaaatgttcctagcgcgcgtatcagcgttgtcggcgtgtaccgcgatgaagaaaccctgaagccggttccttatttccaaaaattggtttcgaacattgacgagcgcatggcgctggtggttgatccaatgctggcgaccggtggttctatgattgcaaccatcgatctgctgaaaaaagcgggctgccagagtattaaagtattggttctggttgctgcacctgaaggtattgctgcactggaagtcgctcatccggacgttgagctatacaccgcttccatcgatcagggattgaatgaacagggttatatcatcccaggtttgggtgatgccggtgataagatttttggtactaaatagttttaccagccgactgagaagtcggcttttttttgctccgcagcctaagaatatcaatcacctagtcagaggatagagaagatgagccgtcgcactataggggtcagcgaacgtccgccgttattgcaaacgattcccttgagttttcaacacctgttcgccatgtttggtgccaccgttttagttcctattctgtttaaaattaacccggctacggtattgctgtttaacggcgtcggtacgctgctgtatttatttatctgtaaaggtaaaattccggcctatctcggttctagctttgcgtttatttcaccggtattactgttattgccattgggctacgaagtggcgctgggcggatttattatgtgcggcgttttattttgcttggttgcaatgattgtgaaaaaagcggggactggctggctgaacgtcttattcccaccggcggcgatgggagccattgtggcggttatcgggcttgaactggcaggggttgcggccggtatggctggattgctgccagcggcaggcgcgacggcggattctacgaccatcattatttcgatggtaaccctgggtgtgactattctcggttcagtattgttccgcggcttttttgccattatcccgattctgattggcgtgctggtaggatacgcgctgtcgttcggcatgggtgtggtggatttaacgcccattcgggaagcccactggtttgccttaccgactttctatactccgcgttttgagtggtttgccattttaacgatcctaccggcggcattggtcgtgatcgccgagcatatcggccatttggtcgtgacggcgaatattgttaaaaaagatttgatccgcgatcctggtctgcatcgttcgatgtttgccaacggtatttccacggtgatctccggtttcttcggctctacgccaaacaccacatacggtgagaatatcggcgtgatggccattaccaaggtttacagcacctgggtgatcggcggcgcggcaattctggcaattatgctttcttgcgtgggcaagctggctgcggcaattcaggcggtgcctgttccagtgatgggcggcgtttccctgctgctgtacggcgtgattgccgcatccggtattcgtgtactgattgaatctaaagttgactacaacaaagcgcaaaacctgatcctgacctcggtgatcctgatcattggcgttagcggcgcgaagataaacatcggcgcgaccgagctaaaaggtatggcgttagcaacggtggtggggattggcctgagtctgctgtttaaagtctttagcctgatccagaaagatgaagaagtgattgaatctgccgaagaccaagcggcgaaatagtagctaagtgccggtgccactgagggattattcggtggtaccggccagtgatatcagggaaaggcgagattgatccctttggcgcttttttcaggatctaaatggtttttatgaagcttttgatttttgtggtaagctctctcggttttcttgcccgttttggttgaggtgcttctgaatacgccggcacagctttcactgccactttatcttcccgatgatgaaacttttgcgagtttttatccgggggagaacccatccctattagctgcgattcaggctgctgttcatcagtctcacggtagttatatctacttttggtcgcgagaaggcggcggacgtagtcatttactccatgcagcctgcgccgaactatcgcagcaaggggaagccgtcggctacgtgccgctggataagcgcgcctattttgtccctgaagtgctggatggcatggaacagttggcgctggtttgcatcgataatatcgaatgtattgctggtgacgatgagtgggaaatggcgatgtttaatctgtataaccgcattgttgaaaccggacgcactcgtttgttgatcactggcgatcggccaccgcgtcagcttaatttgcgtttgccggatctggcttctcgcctggattgggggcaaatctataagcttcagccgctctctgacgatgaaaaactccaggcgttgcaactgcgagcaaaactacgtggatttgaactaccggaagacgtgggccgttttctgttgaaacgactggatagggaaatgcgcactttgtttatgacgctggatcagttggatcgtgcctctatcactgctcagcgtaagctgacgattcctttcgtaaaagatattctcgggctgtagcgactgaacgagaatggacccgaaaggtgcccattcttgtactgaatatcgttacctatctcaatggattataaaatctcaagcacctgctccggcgggcgacccagtcgcgccttaccctgatgaataacgatcgggcgttcaatcagttttgggttattcgccaaggcttgcaacagttgcgtttgagacaggctgctatcggccagatttaacgttttatataactcatctttggtacgcattagcagtcgggcatcgctgaaacccagctgttgcagcagttctgacaacgttgcagcgcttggcggcgtatccagatacagcaccacctgtggcgtaatgcctcgttgttccagcaaagtcagagtctcacggctcttggagcagcgcgggttatggtaaatcgtgacgttgttcattattacattccttgaaaaaatcatcctaaacgcatcaggatttctggtatttacgaaaacgttcgttcaattggcgcaattggtcgatgcgagcatcgtaacgcgcctgcttcagactgcccaattttacccgtgcgctggcatcgccaagtaagccaatcgcctgtggtagtttgccactcagcgccagactttctgcccgcgcagagagttcttcatctcgcaaaccttgtgctgcagaggcttgagccagcaaatcccagccgttgggatcgttcggatgggcgaaagtgtagcgatacagaattcggctagccgccgctggctgctcgccctgtacgtaagcattggcgaggttaagctgtaagactggctcgttattttggctggcaatggctttctctaaccgggcaatcgcctgcgcgtttttattctgccccaaatcaatgtcggtcattaaatcgataaaccagatattgtttggctgttgggtcagcaatggctgcagcacattacgggcgctatcatatttcttagcctgatagaacaagattgcctgaccgtatttggccgcgagctgttcccgcgtggtgcctttgcttagcgtgtccagcaaatccgagctaaggctgtactcggtggaaccatacatccccagaatacggactttggcaaacagataatcctgtgatgaggccactgggtgcggcttcatttggctggcgcggttacgtgcgtcggagagacggctatccggcaaggggtgagtcagcagcatttccggcggtttggaggcatagcgtgattgatccgccagtttctgcataaagttcggcatggcctgcggatcgaagccggcgcgctgtaacaccacgataccgatgcggtcagcttcctgttcgttaccctgagtaaagctgatgataccctgctgggtacccgccagcgtgccgctcagccctgccataccggcctgcgggctggccatggtcaaaagtatcgaacccagtacgcccacccaggtcagcggagccattcgctgctgttcttccatcgcacgcgccaaatggcgttgagttacatgggaaatctcatgggccaacaccgatgcgagttcgctttcgttatccgtatagcgaaacagcgccgagtggagcaccacgttgccgccaaagaaggcaaaggcgttcagttgatcattattgacgataaagaagtgaaaaggggtgcgcaccgagttggcgttggccaccagtcggtttcccaactgattgatatattgagtcagtagtggatcggcgatcagcggcgtgctggcacgcatctggcggacgtaaaaatcgcccatcgccaactcctgattaatactgagagtgccgccggcggtggtgccgatatccggtaacagatcctgcggcgtttcggcagaaacgggcgcgatcccagaatagagcagggtagtgagcaatgtggcgatcactgttttacttaacagacgtgtcataaacgagactgcccctactgaggtaatgacgattttgacgcctgtgatgcgtaagagttcttcttccctgctctgctctccagtacaatcatcacgaacgcgtgttggatcacaaataagcgatcagaaatctcaaaagctctgtccttggctttgtgtcgagattgtctgttatcttagctagctcaccagcacaatggaacttttgcctagcaatattcttagttttactcattaatgctctcccctgtgcttaaagggccgcaaaagaaacctgtatttcgcaggttcgtcatggttttcaaggagcaatctctgatgttagagatgttattacagtggtatcgccgacgttttactgacccacaagtcattgcattgctggttattttactggccggattctgcattctttattttttcagcggcattttagctccgctgctggtggctattgtgttggcgtatttgctggagtggccaacggctcgtttgcaacgcatcggctgttcgcgactgtgggcggccagtatagtgctgattttgtttggcggtatcgccatgctgttggtgttggtggttgcgccgaccgcgtggcagcaagggattaatctgatttcggatatgccgaaaatgttgaatcaattcaatgcgtacgctcagaccctaccgtcacgctacccggcactggtggatgctggcatcgtggatatgatggcggaaaatatgcgcggtaagctttccggcatgggagactcggtcgttaaattctcgctggcttcgatagttggcctgctgacattggctatctatctgattttagtgccgctgatgctgtttttcctgcttaaagataaagaacagatgctgaatgcggtgcgccgggtattgccacgtaaccgtggcctggcggggcaggtatggaaagagatgaaccaacagattaccaattatattcgcggcaaagtgatggaaatggtgattgtgggtattgctacctatctggtgttctttatcctggatatgcgctacgcgctgctgttatcggttttggtgggtttctcggtgctgattccctatattggcgcggtgattgtcactattcctgtggtgctggtggcgctgttccaatggggtatcggtgccgatttctggacgctcatcgtggcctatctggtggttcaggggctggatggcaacctgctggtgccaattttgttctcggaagcggtgaatctgcatccgttggtcattattctgtccgtgattattttcggcggaatgtgggggttttggggcgtattcttcgcgattcctttagcgacgctggtgaaagcggtgattcatgcctggccagaagagtttattcctgacgctgattaatgtcggcgaatacccaatattacccataaaaaagagcgcctgggcgctcttttactttatctgaatcctatttgttggcagacaaatcaggcattttgctgtaggtaagccatcacgatatcgtggtgattggtggttttgaagttatcgaacacgtgttcgaccttaccttcgctgtcaatcaggaaactgatgcgatggatgccgtcataggttttccccatgaagctcttttcgccccacacgccaaactgttcagcaacctgatgatcttcatcagaaagcaaagtgaagttcagcaactctttttctgcaaagcgagaaagtttctcgggtttatcggtactgatacctagcacttctacaccggcgtttttcaatgtatccatgttgtcacgcaggccacaggcctggacggtgcaacccggcgtcatcgctttcgggtagaaataaaccaatacgcgttgtccaaggaagtcggccaaactaatttgctcaccgtcttgatcgggcaaactgaattttggcgcaatatcaccggctttcaatgggctcattactaactctccattcggtcgtcatgctgtgggtagttcacaacgctaatactgccctgcgcattgagttctgtacatagctgatgaaaagcttgttcaataatagaactgttttggctggcagggctgtgggcgctgatctgaatatgtagcaaaggcgaattattgccctctgccggctgggtttttgagaccagttccgcaatgttcatattgtgacaatggaacaggttagtgaatcgctcaataatatgtggggaatctttaacttcaacctttacccagacggtagcaggcatggcttgctgatcctgcgcgttagtgcgtttcatcacaatcagtaaatccagctcggcccctttctgcggcaaagtggactcaatcagagtgatggcgttccaactaccggagagcaacatgatgaatgtgaactcttcaccgaacatcgccaagcggctatcttcaatattacaaccgcaactgctcacatggcgggtgatagtgtttacgatacctgggcggtctgcacccagtgcggttatgaccagataatgttcatcaagctgcggcaaagtcgctcttcctgtgtcgctctatggggttaccatggtaaacataaaaaaaacctgctgccaagcgcttacaacacagttgtttacttgcttttggatagaggtcaaaagtaccatgaggaacttgtttgtggaggagatggccgatgtttacgggaagtatagttgcgctggtaacgccgatggacgacaaaggtgctgtcgatcgtgcgagccttaaaaaactgattgattatcatgtggccagtggaactgccgctattgtctccgtcggcacgacgggtgagtctgcaacgttgaatcacgacgagcatgcggatgtggtgatgatgactttggatctggccgatggccgtattccggtcattgcaggaaccggcgcaaatgctacctcggaagccatttctcttactaaacgttttaacaatacgggcgtcgttggctgtttgaccgttacgccgtattataatcgtccaatgcaggaaggtttgttccagcattttaaagctattgctgaaagtaccgatttgccgcagattctctataatgtgccttcgcgtaccggttgcgatatgttgccggaaacggttgcacgtttagctaaaattaagaatattgttgcgataaaagaagccacggggaacttatcgcgggtaagtcagatccaagtgctggttgatgatgaagatttcatcctgctaggcggcgacgatgccagtgggctggactttatgcaactgggtggtaaaggcgttatctcggtgactgcgaacgtagcagcccgtgaaatggcacagctttgtgccctggcggccgcaggcgatttcgctgaagcacgccgtttaaatcaacgcttgatgccgttgcatcagcatttatttgtagaagcaaatccaattccggtgaaatgggcctgtaaggcgctggggttgatggcaaatgacactctgcgtctgccgatgacgccgctgactgaccctgccaagctggtagtggaaaaagcgttgaaaagcgccggtttgctgtaactcttagggaaatttgatggcaatatcattgcaaaagtcgatggtggcaaaggttgtgggtgtttcgttggtcatgctgctggcagcttgtacaacggatcaacgctataaacgtcaggttagcggagatgaagcctatctcgatgcgccggcgctcaagccgcttaacgcacctgctggtatgattctgccgttgcaaaacggtgattttgatattcgtgaagttcgttctactggcaacgtcggcaaggctctggacattcgtcctccggtgcagccgttggcgctgttgagcggttcgcgcacggaatatactagcgataccagcaagctgttgttagaaagtagcccgcagaatcgtaacctttggagccaggtcacccgcgtgattcaggataagaatctgccggttgccagccgtcaggatgcgaatcaaacgctgactaccgactggatcaagtggagccgcggcgatgaagacgtgcagttcgaaggccgctatcaggtgagcgtcgtagagcagggttatcagttgtcgctggtggtgaaatcactggaactgcagcagggggggaaacccgtcaccgaatatagcgctattcagcgttataacggcgcaatgctgaacaccattattgaaggtctggataaagtccgtaccgacgctgaaaacaatcaggccgctcgcaaagtgggttctctggatgttcaaagcggcagtgacgataccggcttgccgaacctgatcgtccgtgtaccttacgccacgctgtgggaacgtctaccagctgcgctggagaaaatgggcatgaaagtgagcgaccgcagccgtccacagggtaccgtggccgtgacctacaaatctatgagcagcagtagctgggatgcgttgggtgcgaaagatccggagctgaaagaaggcgattacaaacttcaggtcggcgatcttgataaccgcagcagcttgcagtttattgatcctaagggccataccttaagccaatcgcagaacgatgcgttggtggcggtgttgcaggccgcgttcagccagacgagcgcaaactaaacaaaggggcttcggccccttttgtctttgtgtttattagctatatcgggcggtgctggaacgatgcggcgcggctctgtaggtaaagttaattttgttaacattcgttttgttaatgccagttttgtcaacatagtcattctttatcaaagattgtcacactattggagtaataagatgcaaaagctagctgagttgtatcgtgggaaggcgaagaccgtctataccaccgaaaatcctgacctgttggtactggagttccgtaacgatacgtcagcactggatggtcagcgcattgagcagttcgatcgtaaaggcatggtcaacaacaagtttaaccatttcattatgaccaaactgcaagaagccggtatcccgacccaaatggagcgcctgctttctgataccgaagtgttggtgaaaaagttggatatgattcccgtagaatgcgtgattcgtaaccgtgccgccggttctttggttaagcgtctgggcattgaagaaggtctggaactgaacccgccgctgtatgatttgtttctgaaaaacgatgccatgcatgacccaatggtcaatgaatcttactgtgcaacctttggctgggctagcgaagcgcatttggctcgtatgaaagaattgagctacaaagcgaacgacgtactgagcaaaatctttgacgacgccggtctgattttggtggacttcaaacttgagttcggtttgttcaacggcgaagtggtgttgggcgacgagttctctccggatggcagccgcctgtgggacaagaaaaccctgaataagatggacaaagaccgttaccgtcaaagtctgggtggtttgattgaagcctacgaggaagttgcgcaccgtatcggcgttaaattagactaaccgcgcaatcgattacgttgtttttccaatctcgttaatcaggggagagcgttcgtttctcccctctatttctgtgtttttgattaaaatcctgccatttctttcttacgacactatttttaatggtattcatccatatgattttctacgatgagtggaaagtctgttctggagtaaagctatgcgttggcaaggtcgtcgtgaaagtgacaatgtggaagatcgtcggggagcttcatctggtggcggcggtggttttcgcccaccgattggaggcaggggcgggctggtaatcctgattgtggtgctggtagccggttattacggtgtggatctcacgccgttgctcaacggcagcgatccgacgcagcaaaccaaccagcaatccagtgcgccaattagcccgaaagatgagcaaatggccaagtttaccaaggttgtgctggccgataccgaagatacctggaaacctattttccagaagatgggcaaaacctatcaggatccgaaactggtgatgtatcgcggcgcaacgcgtaccggttgcggtactgggcaatcggttatggggccattctattgcccggcggacagcaccgtatatatcgacttatcgttctacgaagagatgaaaaataagctgggtgctggcggtgattttgctcaggcttatgttattgctcatgaagtagggcatcacgttcaacatttgttagggattgatgccaaagtacgccagcaacagcagggagcctctcaggttgaagctaaccgcctttccgtgaagatggaactccaggccgattgttttgccggcgtgtggggcaaagcgatggatgagcaacaggtactggaagagggtgatttacaggaagctctcaatgctgcgcaggccatcggcgacgatcgtcttcagcaaaagagtcaggggcgagttgtgccggatagctttacccacggcacatcccagcaacgttacacttggttcaagcgcggttttgacagcggtgacccaaacagttgtaacactttcgccagccgctaaaatacttcatcgctgcgtgacagcatgattctccgatccttgccggcgcattagcgaccggcatttgttttttgaatattttactttttgactacattgcactttgactaaaaggtagggatgaccatggctacactcgatcctacattgctaatcctgctgggattggctgcgttgggtattatcagtcacaacatgacggtaacgctggcgattttaaccttgctggccatccgtattacgccgttgaaccagtattttccgctagtggaaaaatacggtttaaccatagggatactgattctgactattggtgtgatgacgcctatcgccagcggacgaattagcgccagcgaggtacttaactcctttgttcactggaaatcgattctggcgatagctgtcggtatcggagtgtcctggctgggtgggcgcggggtgtctttgatgacgcatcagccttcggtagtcgccggactattagtcggcacagtattgggcgtagcgctgtttaaaggtgtgccggttggcccgttaatcgccgctggcttgctgtcactggttatcggtaaacaataacgtgattgacactctggttgccttacagccgcagatggtgcagcagggcatacgccgtttggtggtattgagcggttgcgctgactggagccgccaacaggcgaaagcgctgtatcagcgattaggcagtggcgtttggctggctgaacaggggccggattccgctgaaatgattgctccattatcggcaaaaaccttattgggacaggagcgcctgcacggctttttcgatgctacccaagggttgaatatcgatgcgttggcgattttggctggaacgttgcaggcgggaagctggttggttttgctggtgccagagtgggaaaactggccaatgcagccggatgaagacagcctgcgctggagcgagcttacgcagccgattgccacgccgaatttcattcgtcatttgcaacggcatatgttggctgatgcggaaaccatagtgtggcggcaacatcaggtggctcaaccgccgcagtttgccaagcgtgcaacctggcaaccggcaacgggcgcgcctactcaagagcagcgggcgattttgtatgcgctgttgcgttctgaggctgatatttgggttgtgaccgcgcctcgtggccgtggcaaatcgacgctggctggaatgctggtaaaccagtggccaggtgcctgttgggttacggggccgactcggtcagccactgaaatactcaatcactgcggcgatagaaaagcacaattctgggctccggatgcattattgcaacaccttgaaactgaagccaatcatgacgcagactggctgattgtcgatgaggccgctgcgatcccgacgccgcagctatccgccatgttagttcatttcccacgtgtattattgatcagtaccgtacagggttatgaaggtactggacgtggatttttgctgaagttctgcgcgtcgttacctcactggcaaggtttcactttaaaagatcctattcgttgggcaaataacgatccgttagaaaattgtttggaccgcgcgttgctgtttaccgatccgatcgccactgactcagccggtttggtaacgatccgtcgttgccagcagcaggattggctcaacgatcccgatcttttagccgagttttatggtttgttatgtagcgctcattaccgaacttctccgctggatttacgacgtttgatggacgcgccgggaatgcatttttccgctgcggtgagtgctgggcaggtgattggcgcgttatggttggtggatgaaggtggattaacggcggaattagcttgggaagtttgggcgggacggcgtaggccgcgaggcagcttggtagcgcagtctctggcggctcacggaggactgtggtgggcgccgacgctgcgttctcgtcgggtgagtcgggttgcagtgctggcgcaacggcggcgtgagggcattgcgcgacaaattatcgctgaagaaactcggcgggcaaaagatcaaggtgtggattttctctccgtcagttttggttttaccgaggatttatggcaattctggcagtcctgcggttttgaactggtgagaatcggtagccataaagaggcaagcagcggttgctacgcagcaatgggaattttaccgttaacatctgacgcggtagcactatgtttggcggcaaaggagcaactggctcgcgactggcgctggttgcgtcgttggatagatttgacgttgcctttccccgattgcgcagatacggctctcgatgaaaatgactggcaggaactggctggatttgcctttggtttccgcccgatagaagccagtctggcggcgttgaaccgattgttactgcacagtattttgccgctaccggcattgcgacaatatttacaggaaggggtgtctactgcggagattagccaaaacctgaaacttagcggacgaaaagcgctggttgcccgttggcgggaagaaactgcgcttggattgagtgaatgggatgtggcgttgacgggtcggtggcaggaaagggtaaagggggagtaggttttgatcttagtccggcgagccagagctagattcacctgcgggcgttatcagagcgccatgccattcccatcattgcaataaatggaataactcattcaagaaaacccgatattcatctcgtcgcagcggcgtatagtatttctatcgctacctgaatacaggggcaccttttcggctccgtagagccagtatttattgaattaaggagtatcctatgaaccacgagcatttcgttgtacaaagccccgcgacaccggctgagcagctgattttgctctttcacggtgtaggagataatccagtcaatatggggcagatcggcagctattttgctaaagaattcccgcaggcgctggtggtcagtatcggcggacctttcgccagcggcctggttaatggacgccaatggttttccgtgcagggtataacggaagataaccggcaggcacgtattgatgaagttttaccgcagtttgtcgcggtggtacgccactggcagcaacaaagcggactgggcgcgcaggccacggcgctggtcggtttttctcaagggtcaattatgtccctcgaagcggttaaagcggaacctcaactggctgggagagtagtggcatttagtggacgttttgctaccttgccggagcaggcgccaaaagatacggttatccatctgattcacggcgaagatgacaatgttatcaacgttgaacaaagtaaagcggcggcgactcgtttagccactttaggcgcagatgtcacgctagatttggaggaagataatggccatgcgattaatcagggcatgatggattccgcactggaacgcctgcgttactatgtgccccagcattattgggatgaggctttgtccggtaaacgcggtgaactcatcgctttccgataagctgccaaaaaaatagggcaagcgtctgagaatatcgcgcttgcccttttttatgcttaataatcagaacgctagctgttttatcctatataaagaatgatcgcaggctactttttgttcttattatccggccagtcatcgtcgtcgtcccattgagcattattatctcggtgtggcggtaactccggcttattgctcaaaaacttcttatggtcgagccgacgcagctctttgatcccattcaaaataatccctaccagcaggatcagtacaatccaccagtaatctgctaaccattgcatgggcgcactcctttggttgtcgatatgaaacgcgagaataccagtggtaaatggctggcaagccactcaataccggcaacgtcctgttgttgccaggcttcaagcagcagttctggcgtgagtaaatgctcagcctggtccgccaatggtcggtagcttaaatgccatggctctaccgctacgccgccgctgtcttcaacgaaggggcgatagaagccaaaattggccatattggcgctaagccattgggttaaagaataaaaatatccgccagcttcatattcccaaggctctaactgtagtttttccccttcgggcagcagggtcggatcgtaaatatccaaatcgctgccccagtgatgacgactggcacccggtaatgctgaccagcgcagaatggcctcacagcgttcgcccgcactcattcctgaaatatccagcggctggctgttgtgatctaatactggccgctcaccgcggaatttaccattccagattgctaattgtcgttcaaaatcccgaaaggtactagcgggttgcagattcagaccagcgtctttagccgcctgctgcatagcgagaaacgcttttacggcctgaggttgcagacggtgattcccactgagcggaaccagatgctcacaggttttgccggtcagcatttccggggtcatcatgcgatcaattgttccataatgcgttgatacatgcggctaagtaactgcaaatcagccgcgttaacgcattcatttactttgtgaatagtggcgttaaccgggcctagttcaaccacctgtgcgcccatcagtgcgataaaacgcccatcggaggtgccgccggtggtcaatagttgaggcgtcacctcattatacaactctaccgcgttcaccaccgcatccactaaagctccgcgtgcggtcaggaacggctgaccggaaagcacccaatcgatgctgtaattgagttgatggcgctccagcaaagcttcgacacgctgccggatgagcgcatcggtcaattcggtgctgaaacggaagttaaactgaacgtaaagttcgcctgggataacgttgttgctgccggttcccgcttgcacgttggcaatttgcatactggtcgccgggaagaattcgttgccttcatcccattgagtggtaaccagttcctgcaatgcaggcatcgcgcgatgcaccggattatccgccagatgaggataagcgacgtgaccttgaacgccatgaatacgcagattggcggtgattgacccgcggcggccatttttcaccacgtcaccgacgcgttcagtgctggatggttcaccaaccagacaatagtccagccgctcgttacgtgccatcagcgtgttgaccactttcaccgtgccgttaatcgccttcgcttcttcatcggaggtgatcataaaggccagacgccctttatgattcggattagcggcgacgaaacgctcagcggccactaccattgcggcgagtgaacctttcatgtcggcagcaccacggccataaagcataccgtcccgaatgaccggatcgaacggcggattagtccaatggctttcatcgccggtgggcaccacatcggtatggccggcaaaagccagggtttcgccttcaccgcgccacgcccagaaatttagcgtatcgccaaaattcatcggttcgacggtaaaaccaatcgcctgtaggcgctggatcatcatctcctgacaaccggcatcttctgggctgagagaggggcgacggattaactgttgggcaagttcaataacggggcagctcatcttaacgcacctctgcaaaaaactgttgatagctctcaggtttgaaaccgagcaaaatgccgccgtttgccgcttccagcaccgggcgtttaatgattgccggttgttccagcattagagccttggcggtatgcgcatcgaccacggcggcgcgctgcgcttcatccagtttacgccaggtggtgccgcgagtattcagcagggattcccagcctaaatgttcgataaaaccttgcaaaagcgtatcggttaatccgtcaacgcggtaatcgtgaaacctatagggaatcgcgttgtcttccagccagcggcgggcctttttaatcgtgtcgcaatttttaatgccatagaggctaattgggggattttccgggctatctgacataaataacaatggcctctacaaaattatgggcaaatgagtgcgggtaaacccaaaagttgtatggaacctcggatttaggctacatcacataatgcggcaaaatgccctgtgaatccagacggctattgtcgtattccctcaatggggtatttcgcgcaggttgagccggagagggttgccatttcagtttatgtcctgataacgtagatccttatttcggtgcttgtttagatagggatattaatatgcagggaatattacgcttttgtgtttttttcggatgttgtatgacgatgtttacagccagtgctgccgggccagatggcgtattttcgctgattgatcagcgtttatcttatatgaaagatgtcgcgggctataaggccgcccatcatctgcctattgaagatttagcgcaggaaaaacgggtattgcagcaggtgatggatgaggctgaaagaaaggggattgatcctgaatcgattaaacccttctttatcgcttcgatggatgcggctaaggcgattcaatatcgttatcgggccgagtggttatctaaaccggcaaagggatgggaactacgcagcctagataaaatccggcctgaaatcgccaatttaagtaagcaattgatcgcagaaatttattcgctactggcttccggtcaaaccattgaacagagcgaacggccacgttttatggatatcgtgcatcagatgaatttgaatgataatgataaaatgcgtttattctcaactctacggttaattaaactgagtcagaaataatgcaattgccaccccgttgcgggtggcgtttcttagattagccatttattctctgcatcagccaatccgatccaagtctgctgcgtactgtcgaattgcccgttgatataggctgatttctttatggttagaggtttctgccagaagcaatagcaatgaggcgacagcgtctttggtttcgcccagattatataacgtcatggcgcgaaatagcgttatctctttggcatcagggaattgcgttaatgccttttcgaatacatccagcgattctttatatagacccagagtacggtaggtactgcctaatcccagataaactgcctgtaattcttctgcgcccagatggttgtcaatggcggtcagataaaatggaatcgcctgcatttctaaaccctgaacgtcgtacaacgaggcaattttatgcagcaggctaccgttatggggatcttcaaccagtaatttgaatgccaaagtcatggcatcgtcataacggcccagtttttccagagaatctatggtgtgtttcatggcatatggcgcgttaatgtgagaataacccgcacgctactctgtcgggctgaaacaggcaagcctgcatgtgtaataacctgagttatttcaatatctccgccaacgaaattatatcctaaatgattagtctattatttcgcctttatttgttcgaaaactaatcgtataatcacggcggttattagagaggacattatggttgatgtagagttaaacacatggaaagagtttatcgagtcaatgctgagtaaggcataattcgataaatgagtaatagcggttgatgctattttgtatgacttagatttacccagggagcgagtgactcgctcgcaaaaaggcaggttctcaaagaatctgccttttttatttgggtcacggcacgtttgatatgaaagctattttagatgtcgtcaatattattcacgttatccgatgaataacttatcaaataacaataactttttagtcgacattaataatgtggttttctccgctgaatgtattacttcctctatttattaggaaataatttagcaggggattgttaaggaaaatttaatattgattaatcattcactcatacaatatcgttatttttttctgaagatgtggcgccaatcaattcactgaaatagtgaacgattggcgcaatcattgtgaatgaataaagaattagtgctcatcagcctgattaggctggctcccacgaatcggccttcccgggaaacgacggcgaaccaaaacaaagaataatggcacgaagaagatggctagaaccgtcgctgaaatcatgccgcccatgacgccggtacccacagcgtgctggctgccagagcctgcgccctgactgatagccataggcaatacgccgaagataaaggccaatgaagtcatcaaaataggtctgaggcgttgacgcgaggcctccagcgtggcttgaaccagatctttgcctttgttatttaattcattggcaaactcgactattaaaatggcgtttttggccgatagcccgatgatagtcaacaatccgacctggaaatacacatcgttttccagcccgcgcatccaggtcgccgcgacggcaccaatcacccccaaaggcactaccagcataacggagaacggaatagaccagctctcatacagcgctgccagacacaggaacaccactaataacgagatagcgtaaagcgccggagcctgtgaaccggacaggcgttcctgataggacatgcctgtccattccagcccgaaaccattcggtaactggctcaccagcttttccatgatgtccattgcagcaccggtactgacgccttgggcggcttccccgacaatttccagtgcggaataaccgttgtaacgctcgagacgcggcgagccaaattcccagcgggtagtggcaaaggcagagaaaggcaccatgccgccgctattattccggacataccacttattgatgtcttccggcagcattcgagcggtagcttccgcctgaacgtaaactttcttcacccgtccgcggtcgacaaagtcattcacataagttgagccccaggcggttttcagcgtgttattaatatcatccagcgatacgcccagtgcctgagccttgcgttgatcgatatcgatttgcagctgcgggctgtcgtccagaccgttatgacgaactcgcgtcagctctggctgtttggccgctagctgtaacagttcatcccgcgcggccattaatttatcgtgcccctgaccgccgtggtcctgcaattccagatcaaagccagaggagttgcccagacctgaaattgctgagggactactggctgaaaccttggcttcagtaattttgttaaaagcctgggttgcccgctcaataatggcaaaagaagaatcctgactgttggatcgctgatcccagcttttcaaacggacaaacaggcgagcaacgttttgcccgttaccgccggggcctgaacccacggtagaaaacaccgatagcacgttatttttttcttccgtcaggaggtaattctccactttttccactactttcagcgtttgttgctgagtggaaccgacgggtaactgaacctgagccataaatacgccgcggtcttcctgcggtaaaaacgaagtcggtaacttgaggaataaaaacgccaggccgccgagtaagagtaaataaaccaggatatagcgcaggctatgatgtaaaacccgagcgacgccgttttcatagcgtttcgcattgcggtcaaacatacggttaaaccagccaaagaatccacgtttaccgtgatgatgcccggctacgaccggtttgagtaaggtggcgcacagcgctggcgtcaggatgagagcgactaaaaccgacagaaccatggcagaaacgatagtaatagagaactgacggtaaatcgcgccggtcgtgccgccaaagaaggccatagggataaataccgctgaaagcaccagtgcgataccgactaacgccccttgtatctgccccatagatttccgtgtggcttctcttggtggcaatccttcttcgctcatgacgcgttcgacgttttccaccaccacgatggcgtcatctaccaacagcccaatggctaataccacggcaaaaagggtgagggtgttaatgctaaacccgaaagccgacaaaatggcgaacgtccccaataacactaccggaacggcgatggtcggaattaaagtagcacggaaattttgtaaaaacagatacataaccagaaacaccaatagcaccgcttcaaccagggttttgactacgtctttgattgaggcttgtacgaaaggggtagtttcgtaagcgattttggcttccagcccgtgggggaagaacggagccagttcggcaatacgcgctttcacgagcttatcggtttgtaattcattggcaccagaggccagtttgatacccattcctgacgcgggctgcccgttaaaccggctgagataatcatatttctctgcacccagctcaacttttgcgacatcgcctaaggtcaccaatgagccgtcttgattcacccgtagggtaatttcacggaactgttctggggtttgcaattgggattgagcgttcatggtggcattcagtgcttgattatccaccgaaggcgtaccgccaagctgcccgacggcaatctgactgttctgggatttgatggcatccacgacatcctgagtggttaatcggtagttagttagcttggaaggatcgagccaaatgcgcatagcatattgggaaccaaaggcatccacgctgccgacgccttcaatacggctgattggatcttgcaggttactggccacataatcggcaatatcctgtttatccatgctgccgtcggtagagacaaacgcgagcatcatcagggtattatcaccagatttagagacgttaaccccttgttgctggacatcctgcggtaactttttaaccgcagactgtaactggttctgcacctgctgcatggcttcatttggatcggtgccggcctggaaagtcagcgtgacgctggcactcccggcattactgctctgggaggacatatacagcaggttgtccaggcctgtcatgctctgttcgattacctgagtgacggtgttttcgagcgtttgagccgacgcacccggataactggcagaaatccgcacatttggcggagccagattaggatactgttcgacgggtaaagagaaaatggccaacatcccggtcaggcagagaattatcgctaacacccatgcaaaaatggggcgatcgatgaagaaatttgccatgtagcgggaacctcgttaagcgtgaccttatcactggaataggaaaaatattacttttgtgaatctgtcgctactttacgtgtgaatcagtgatgaaacgtggagaaaaaaaggagatagtgtaaaaaaacacaaggtcgcttttttttgctgccttattgctcataactcgcgatatccagaggttatttctcatcgcgcagattgatgtccggcggtttggcgtcgaacagcaatgtcgcctgagaacgtccttgaaccaaaatagtatctttaaacaggatataactatggaactcaatccggtattcgcccggcgactttatctgtgctggttacttagtgtaagtgataagcccaatgtgccgcgattaatggcgttaaccggctggccgcggcgcaccttgcaggacgtgttgaaagccttgccggggctgggcgtcactttaacctttgttcaggacgggataagaaataatgacggtttttactgcctggaaagctgggggccgctgaataaaaagtgggtgctggagcaccataaagtcattttagcggccatagagtagccccggttgaccggggttagtctcagtggcgcttgttttccagatacaaaatggtggcggcgacccgtgaacgcacattcagtttacgtaacaggttacgaatatgaactttcaccgtttcttcggaaatatgtagctcgaaagctacctgtttattggacatgccgcgcgcaacttcctgaagaacatccaattcacgctcggttagttctgcaaagggattaatctgttcgtggcgagaggagagatactcttgcacttcttcgctgaacacgctttctccctgagcggcctgccgcaaatgctccagcagaatttctggctcgctgtcttttaacaggtatccgtcggcgccggcgtcaatcatggcgtacacgtcgctgcgggcgtccgaaacggttaatacgataattctggcgccaatgccgtcgttacgtaacgctttcagcgtgtctaagccgttcattcccttcatattcaaatcgagcaaaataacgtcgggtagagtttgactggccaattccaatgcttcttcgccgttattggcttcggcgactacggtaaatgccgtttccagttctaacagctgcctgatgccgcgacgcattaacggatggtcgtcaacaatcataatggtgtgatttgtcgtcatgataggtaatgctccctgtagccagtaaaacgtaccgcaacaggcaaggttatgccgattccggtagcaagattatggtggaattacgtggtgatagccgaaaaacctttagccaacctaaagtggattctttttattgcgtaacctggaacccattacgctccgttaaaacggtacgatccgctatttattgtaccgcaaccgccctgaatattataaacctgttctgctttaattcatgatttctgtctatataacacggtaaaacggttattaggtgattaattttatatgcatacagttatgcgaattatttaataaataagatcaccttgattattctatttgataaataaaataatcatgaaaatactgatcgtgctcatcttggcttaatcttgattcagccgttagttaaatcgttatgtaaaaatataaataacgcaaatcggttaaagcaggagggaaaggacaaataacgctggaaataattgatctggcgcaatctttccctctgattaactctaaagggtaattatgtttttaccaataattgggtatctactgttaccaaactagggaaaccatttagtggtaatacgaataataataattatcaccattttgattttccggccagagcagccgggtcctatttgctaaaccacataataatctggaagcaattaggtatttaaataaatggcaagcagtgttgccagcaatgtcaagggtatcagtatggccgatttgtcccgacgccgattgctttcagggcattggcggcgcaatgctgaccattcgtcttccgttatccggccgccctggtcggttgccgaagctgagttcacggctggctgcacgcgctgccacgcttgtatccacgcctgcgaaaccggagtgcttattgccggccgcggggggttccccgagatagatttccaacgtgccgaatgtactttttgtactcattgcgtaaccgcctgcgaggcaccggtttttacctcgccggatcgcgaaccgtggcagttgaaagccacattctcggcaagttgtctgccttttaaaggcatcgaatgccgtagctgtcaggatagctgcgaaagccgggcgatcggattccgcccgcgtttaaacggcattgcccaaccagaattagagatcgacgcctgcaacggatgcggagcctgtgtgcccggatgtccggtacaggccgtgactcttacccggagcgaagatggaagataaagaatggcatgtttgcggtctggtggtgcaagccaaaccggaacgcattccccggttaatcgacgagttactcgcgattccgggaacagaaatacccaccagtgacgcccaacagggaaaactggtggtggttatgcaggcagcgcgctcagacgtgctcctgagacaaattgagtcagcgcgtaatttgaccggcgtgctggttgtgtcgctggtatatcaccagcaggatgagcaaggtgaggaacaaccatgaaactcagtcgtcgggacttcatgaaagccaatgccgcagtggccgccgccgccgctgcggggatgaccatacccaccgtggccaaagccgtggtgggtggtgcagatacgattaaatgggacaaagcaccttgccgattctgtggtaccggctgcggtgtactggtggggacgcaaaatggccgtatcgtggcgtcgcagggcgatccggattcacccgtcaaccgtgggctgaactgtattaaagggtatttcctgccgaaaatcatgtacggcaaagaccgtttgacccagccgctgctgcgtatgaaagatggccagtacgataaagaaggcgagtttactccggtaagctgggaaaaagccttcgatatcatggagctaaaatttaaaaatgcgctgaaagaaaaaggccctaccgccgtgggaatgttcggctccggccagtggacaatctgggaaggctacgccgcgtctaagttaatgaaagccggtttccgctcgaataacctcgatcctaacgctcgtcactgcatggcatcgtccgtagtgggttttatgcgtacttttggtatggatgagccaatggggtgctatgacgacattgagcaggccgatgcattcgtgctgtggggctcgaatatggcggaaatgcaccccattctgtggtcgcggatgactagccgtcgtttaaccgatcctaatgttaaaattgccgtcctttcgaccttcgaacatcgtagctttgagctggctgacaatccgattgtcttcacgcctcaaaccgatctggtgatgatgaattacattgccaattatattattcaaaataacgcggtagatcaggatttcctcgatcgtcacgttaatttccgtcgcggtgccaccgatatcggctacggtttacgtccgactcatccactggaaaaagcggcgaaaaatccaggcagcgacgcgtcggagccgatgagttttgaagacttcaaagccttcgtggcggaatatacgctggaaaaaacctctaaaatgagcggcgtgccggaagatcaactggaagcgctggcgcagctgtatgccagtccaaaagtgaaagtggtttcctactggaccatgggctttaaccagcatacccgtggcgtgtgggcgaataacatgtgctacaacctgcacctgttaaccgggaaaatctccaagccgggctgcgggccgttctctctcaccggccagccttccgcctgcggcactgctcgtgaagtgggcactttctctcaccgtttaccggccgacatggtggtgaccaacgagaaacatcgccaaattgctgaaaccaagtggcaactgccagccggtacgatcccagagaaagtcggtttgcacgccgtggctcaggatcgcgcgctgaaagacggcactcttaatgcgtattgggtgatgtgtaataacaatatgcaggccgggccgaatatcaacgaagaacgtatgccgggctggcgtgatccacgtaactttatcgtggtttccgatccttatccgaccatcagcgcgctggccgcagacctgattttgccgacgtcaatgtgggtagaaaaagagggcgcatacggtaacgctgagcgtcgtacccagttctggcgccagcaggtgccatcaccgggtgaggccaaatccgacctgtggcaaatggttgagttttccaaacgtttcaaagtggaagaagtatggcctgctcaattgttggatcagaaaccggagtatcgcggtaaaacgctgtttgacgtgctgtacgccaacaacgtggtgaataaattcccattaagcgaaattccggctgatcagttgaacgatgaagcgcgtgattttggtttctatatccagaaagggctgttcgaagagtatgccgattttggtcgcggccacggtcacgatttggcacctttcgatcgctatcatcaggagcgaggtctgcgctggccggtggtggacggcaaggaaaccctgtggcgctaccgggaaggtttcgatcctttcgtaaaagccggagaaagcgtgcgcttctacggtaaacctgatggcaaagcggtgatttttgcgctgccttatgagccagcggcagaaagtcctgatgaagaatataacctgtggctgtcaacgggtcgcgtgctggagcactggcacaccggttctatgacgcgtcgggttccggagctgcatcgtgctttccctgaagcggtgctgtttattcacccgctggatgcgcgagcgcgggatctacgccgaggggacaaagtgaaagtcatttcccgacgtggtgaagtgatttctctggtggaaacccgtggccgtaaccgtccgccgcaaggattggtgtttatgccgttcttcgatgcggcgcagttggtcaataacctgaccttggatgccaccgatccgttatccaaagaaaccgactttaaaaaatgcgcggtgaaattggaaaaggtttaaccctgatacccagcctgctgtcggagccgttttaaggcacgcaggccgatttagggaaagatgaagtgtctttcgggagccaaataatgaacaacaaaatgtttaagtcgtttagccgctggttggtgctagtggcactgattttgggcggagcggcttatgccgccagcaatgtcgaaatggatttgagccaatcgccggaggtgtccggaactcaggaaggcaaggtaaaaatgcctaaacaacaacagcgtatggcgctgaactatgttaaccaaccaccgatgattcctcacagcgtggagggttatcaggtcagcaaaaacaccaatcgctgcttacaatgtcacggcgtggaacattatcgcaccaccggtgcaccgcgcgtcagtccgacccactttatcgatcgtgatggaaaagtatcgagcgaagtttcgccgcgtcgatatttctgcctgcaatgccatgtgccgcaaacggacgcggcgcccattgtagaaaacaccttccagcctgcaccgggctttggtaaataaccgaggtagttatgacagaggaaaaaaaaccgggtgtgatccggcggttatggcagtggtggcgcaggccgagccgattggcgctagggacgttactgctgatcggttttgttgctgggattattttctggggtggtttcaacaccggaatggaaatggctaacaccgaaaagttctgtatcagttgtcatgaaatgaaagacaacgtgtaccaggaatatttgggcactattcactacagtaaccgcagcggcgtcagagccacttgtccggattgccacgttccgcacgaatggggcccgaaaatgttgcgtaaaatcaaagccagtaaagaactgtacgcgaaaacctttggtttgattgatacgccgcagaaatttgaggcgcaccggctgacgatggcgcagagtgaatgggcgcgtatgaaagccaataattcgcaagaatgtcgaaactgtcataacttcgacaatatggatttcaccgcgcagaaaaccgtggcggccaaaatgcataatagcgcgattaccgaaggcaaaacctgcgtagattgccataaaggtattgcccataaactaccggatatgcgggaaattcctaacggcttttaattccctcctcgtatctgagtgctgtatttttcaacacctcgctggcttttgctgacgaggtgtttttttattgcaaagttatctccactagcgttagctagcgccaggaaaaaaaacttcaattacatgatacggactgaatatatgtcagcaaaaatcgagaatatccaacgcacgttattatctgataattggtatgtgctgaataaatattcttacgacttaaaaagaaaaaacggtgagttagtccatcaggagcgtgaagtctacgaccgaggcaacggtgccactatcttgttatataaccgcgccaaaggaaccgtaatattaatcaaccaatttcgtatgcctacatatgttaacggcaatgaaagcggcatgttattagaagcctgcgctggtctgttggatgcggatactccggaagactgtattcgcagggaagcgatagaagaaaccggttttgaaattggcgaagtggaaaaactatttgctgcgtatatgtcacccggcggcgtcaccgaactggtgcatttctttgctgcggaatatctgccggaacagcgtatttatgccggtggcggtattgatgacgaagatatagaggttctggaaattcccttcaaagaagcgctggcgatgattgccgatggtcgcatcaaagacggcaaaaccatcatgctgctacagcatgcgcagattaagggctggtttgaatgaccgaggcacttttcaacaaattcatcttatgtaagtaactaaagcgtaaaatgttgcgaagagtttgggctgcttcatggtttaggcctattgactcactatactggttctgttcctgattttacctctcaacatataaaagcaaaagggatcctataatggacgaacagttgaaacaaagtgccctggattttcaccaatatcccactccgggtaaaatccaggtctcgccaaccaagccgctggccacgcaacgagatctggcgctggcgtattctcctggcgtagcggcaccttgtctggagattgcggccgaccctttggctgcctataaatatactgcgcgcggcaatttggttgcggtgatttctaacggcactgcggtgctggggctaggtaatattggcgctttagccggaaaaccggttatggaaggcaagggcgttctgtttaaaaaattctcaggtattgatgtttttgatattgaagttgacgagcataatcccgataagttgatcgacattatcgcctcactggaaccgaccttcggcggtattaatctggaagatattaaagcgccagagtgcttctatattgaacaaaaactgcgcgaacggatgaacattccggtattccacgacgatcagcacggcactgcgattatttgtactgcagctgttctgaacggtctgcgcgtagttgagaaagatatttctgatgttaggctggtggtttccggggcaggggctgcatccattgcctgtctgaatctgctggttgcactggggctgaaacgtcacaatattacggtttgcgactcaaaaggcgttatttatcaaggtcgcgaacccaatatggaggcgaccaaagccgcgtatgccattacggataacggccagcgtactttgggagatgccattccaaacgccgatattttccttggctgctccggccccggcgtattgacgcaggacatggtcaaaaccatggcccctaatccgttgattatggcgctcgcgaatccagagccggaaattttaccgccgctggcgaaagccgtgcgtcctgatgcgataatctgtaccggccgttcggattatccgaatcaggtgaataacgttctgtgtttcccgttcatcttccgcggcgcactggatgtgggtgccacagccattaacgaagagatgaagctggcctgcgttcacgctattgccgatctggctctggcggaacaaaacgacatagtggcttcagcctacggcgaacaagacctgtccttcggccctgaatacattattcctaagccttttgacccacgcctgatcgtcaaaatcgcccctgcggtagccaaagcggccatggactctggcgtagccacgcgtccaatcgaaaatttcgatgcttacgtcgagaaactttcagaattcgtctacaaaaccaacctgtttatgaagccgatcttctctcaggctagaaaagagctgaaacgagtagtcctgacagaaggggaagaagaaagagtattgcatgcgactcaagagcttgtttctcaagggctcgcattccctattctgattggtcggccaagcgttattgatatgcgactgaagaaactggggctgcaaatcgttgcgggtaaagactttgaagtggtgaataacgaatccgatcctcgctttaatgaatactggcaagagtactaccagatcatgaaacgccggggtgtttctcaggagcaggcgcgtcgtgccgtgattagcaatacgacggtgatcggttctattatgctgcaccgcggcgaagccgatgccatgatttgcggcaccatcggcaattatcatgagcactattcggtggtggagaaagtcttcggtttccgtgatggcgtacacgtggctggcgcgatgaacgccttgttgttgccaaccggtaatacttttatcgctgatacctatgttaatgacgatccaaccccggaagaactggctgaaattactttgatggcggcagaaaccgtgcgtcgtttcggtattgagccaaaagtagcgctggtttctcattctagtttcggtactgcggattgcccatcagcccgtaaaatgcgtcgtactctggaattggtcaaccaaatggcaccgcagttggaaattgacggcgaaatgcacggcgatgcggctttggtggaaagtattcgccatgacctgatgccggacagtccgttgaaaggtgcggctaatgtgttgattatgccgaatatggaagcagcgcgtatcagctacaacctattgcgcgtgacctcatctgagggcgtaaccgttggtccggtattgatgggcgtggcgaaaccggtgcatattttaacgccgatcgcgtcagtacgtcgtattgtgaacatggtggcactggcggtcgtcgaggcacaaactgagttgctgtaatacttaatcacgttgttgaaaatcagagcctttgtctatcgagacagaggcttttttatcgattttatttttccacatcaatgaaacattcttgttctattattggtacgcaacaaattgtaaatgattatcattatctatattatgcggacgattaaaccgctaaatggataacgcctgctaatgagaatcttattattattcagtatgtttttaatgattagctgtacttctacgcctcctaaaaatattccgagcgataaatccgatattaccgccttcggaaccattaccgatcttcataccggaaaagtcctgacggcctcccagttagtggatgagctggcgggtgctcctcaagtgatcgtgggtgagaaacacgataatctttatcaccatcaaatcgagcggtggttgatagaaaatctggcacagaaacggccacagggcagtgtattgctggaaatgttgaatccgaaccaacagatcaaggtggataaggttaagtcctggctacagcaagagcctcgtgttagggaaagtcgaattgtggagctgctggcttggcagccgggctggagttgggcgctgtacggcgatctggcaatgacggtgatgcgtgcgccttatcccgtgtggtcggcgaatttggatcgagatgaaatcatggcgatctataaggaaaaaccgccgttagagggcaaattttctaccacgccagaagtgcgcgcggcgctggaaaagctaattcgtgcgtctcacgataataaaattgatgcttcgcaattagcttcaatggtggccattcagcagcagcgcgaccgccgtatggctgaacgtttgctggccgcgcccactccaacactattaattgccggcggttatcatgcggcgaaaaatattggggtgcctttgcatatgcaggatcttaaagcggcttcacacccgttggtgctaatgctggctgaagagggcgctaacgtagggccagaaaatgcagattatctgtggtctgtaccggtaaagactttaccgcgctaagaatgtcgccgagcgaaaaaacatcgccacgttaagaatttttccttatccccgcgcaacaaatgcgacattttatgtcgcattattcatttatttgcactgaatctgaaaagagactgttaatttcatttacaaatgattatcattgtcaaatataattgataatcatttgcattctaatcattccatgcattcactgtatttatacgatcaacctttaccaaagccgaaagttggccaaggttttgttctggctatcgctgctcatctcgcagtgtcgtggttgatctttcgcgttgctgaaaccttgcctccgttacctttgccgcctcccgcagtgatgatgcaatggtcggcgcacattgaagcgccagctacgccgaaacctttgccaatcggtgagcagcagacagtctcatcggcggcttctgaaccccagaaaagcgtagagaagcagccggagttaccgaagctggccagagttgaaaaagccaaaattatcgtggctgaaaataagcctgagcctagagtgcggcaaaaacagcccaagccggagaaacctcaggctattaccagcccaactgcgttggcgtctgctgccagcagtgctgccccagtggcacaaagtcagccttctgaacgcgttgccgcgccgataaatagcgatgccaacgcaaaagtggaagccaaaatttcctgggaaagtttggtaagagggcatcttaatcgttttaaacgttatcctgccgaagcgcaggtacgtaaccgaactggaaccgtcttggttgaatttactcttgattatcgtggcaatattcttagcagcaaaaaaataaactcatctggtacacaatccctcgatcgtgaggcgatgagaatgctggaaaaagcgcagccactgccgataccgccagaatcaatattgtatcaggggagacttaccgtcacgcttcctattgattttagtttaattaatcaacagtaatatcactgattctaattgttaaataaccctaggtgaggtcatttgtcttttgatgacccggttagctacagaatttgtagtaaataaaatagacagtatttaattatatcagagggactatgagatattttatatcacctaagattaatgcgggtaattgcttaataccttcgattatttatctcggtttattcagtttctccttatttgcaggtgcggctgagatggctgagccaacgccacctattgcggaaaaacatccacatcaattaactctacattcagaaactcgcgtcgataattactattggctgcgagatgacgaccgcaagaataaaaaggttattgattatctgaaggctgaaaatagctacgctgaatctatacttaaaacaaccactaccttgcaagatacgctatatcaagaaatgctgaagcgagtaaatcagcaggatcaatcggtaccttatagtcttaatggatatcgttaccaggaaatctatcaaccgggtaaagagtatgcgcagtaccaacggcagagggaagtgcctgatgctgaatgggaagtgttgctagatgccaatcagcgtgcgcaggggcatgattactataagctgggtgggctgagcgtcagccgtgataatcagcgtatggctgtggcggaagatacgctgtctcgtcggcaatacagcatccatttaaaacagattgccgacaaacaatggtctgatgaggtgattcatgacacttcgggcaatatggtgtgggcaaacgataataacactctgttttacgtacgtaatcatccgcaaactttattgccgtatcaggtttttcgccatcaatacggtacgccagcagaaaatgatgtcttggtttaccaggagaatgacgatagctattacctcagtttatcgcccagcacttctcgccagtatattttgataaatatcagcagcaccgcgacttcggaaacccggttactggatgccaatcagccacagcaggcaccaacggttttctccgcccgccaaacgggacgtgaatactacatcgatcattttaacgaccaattttatattcgctctaatcatcagcatcctaattttggcttgtatcagactgtatccggggaagcctcttggacaacgctgattgcaccggaagattctaaagacgtagagaattttgtgttattccgcgattggctggtggtcgctgaacgggagcagggcttaactcatattcgtaaaatcaattggcagagtcagcaacagcagccgttgaccttagaagacccgacttatatggcgtggctggcctataacccggagccagatagccacgttctgcgctatcgctattcctcaatgaccacgccgacctcaacttatcaatgggatatgattagcggagagaaaactctgctgaaacaacaggaagtaaaaaactttaatcgcgatgagtaccaaagccagcgtatctgggttacggcccgcgatggggtgttggttccggcgtcgctggtttaccgtaaatcattatttaaaaaaggccataatccactactggcttacgcctatggggcctacggcatgagtatggacccttcgtttagcgcgaaccggctgagtttattggatcgcggttttatctttactttgattcatgtgcgcggcggcggggagctggggcaagggtggtataaacaaggtaaactggcgaaaaaagaaaacagtttcaatgacttcatcgatgttactcaaggtttggtacagcaaggctttggccagccggagcggttgtatgccatgggcggtagcgccggggggctgctggttggggcggtcattaatcaggaacccactttatttaacgcagtagtggcgcaggtgccttttgttgatgttgtgacgactatgtcagattcctcgataccgttaaccaccaatgaatacggggaatgggggaatcctgaaaagttatctgattataaggtcatgcgagcctatagcccttacgacaatatctctcctaaaaattatcctaatttattagtcactagcggattacatgattcgcaggtgcaatattgggagccagccaaatgggtggctaaattacgagagtttaatcggggagataatattattttattaaccacggatatgagtgccgggcacggtggtaaatctggtcgtctcagtaggttgaaaaatagtgcccaggaatacgcctttattttagcaatggacgaaaaagtaaaataattccacataaaaatgtggggtaaacaagtaagaaaataataagaataaaatccagagtattcatattgggtatgaatgctgcacggctatttgaacgctataacacgagcaagtttttaatacggaattttaaattaatttcttgagggatttatgagagttaatctagtggtaaaaataatgggagccggattggtttttatcggattgtcagcaataactcaggctgaaactgaatcggccaataccaaggaaagaatggtattcagcccgttaacggtgtcaggagcaaaaacatcgcctgaaaacagtgcgttggaaaagccaggcgcattcagttctcgcggagaaagcaaagacctgcaatcaatagattcggtgattagaagcatgccgggcacctcaacgcaaatggatcccggtcagggaaccgttagtgtgaatatccgtggtatgaccggctttggtcgggtgaatacgatggtggatggtgtaacgcagagcttttatggcagtgcgcctaacccctataaccatggacagtccccgaccacccaattcggtgcacttatcgaccctaactttatcgtgggcgttgatgtggttagaggcaatgccatcggcgctgacggcgtgaatgcgctagctggtagcgccaatttccgaactatcggcgtggatgacgttattttctctggtaatccctttggcatcagaagcaaattctcgttgggtaataacggtattggtcgcagcggaatgattgctattgcgggtaaaacagatgcttttaccgataccggcagtattggcgcgatgttagcagtgagcggcagcagtattgacgccagttataaaaatggcgatggggtgatgagtcaggaatttggtagtgacgaaacctttaaacaaaatccgcagtctcagttaattaagctgaatatcaaaccgaatgagtttaatgacatcgagctatctggccgagcttataacaataaaatcagccgccgccacattaacagcgatgacttttatattaaatacaactatacaccgttctccgagctgattgatttgagcgtattggccagcgtcagccgcgggaatcaaaaatatgactccgacgcattgaacaaatttaccaactcaagtgctaaaaacagctcagacgcgattgatattaataatgtcagcaaattcagctacgctgatacggattttgccgtcaaaatcggcggtaaattgatgaatactgagtattacaagcatattgaaactactgagccggataataaaacagcaggagaaatactggagaacaacgtgttcgcaccgggcggcagacaggatatctctagtctgtataccggactgcaaataaatcgcggtatttatcaggctaattttgatctcaattacactgaagctaagcttaaaggtttcaaacccgcctgcgacgatcgcatccgctgtttcccgcagggcagcgcgaacattaatttaagtgaacatggctttaatccgagcgtgctgctgtcggcggatattgtgaattggttccagccttttgtcagctatacccaatcaatgcgtgcgccaaacgtgcaggaagtgttttattccaatgagggaggggcttcgatgaacccattcctgaaaggtgaagaggcagaaacttatcagctaggttttaactccgccagccaggggctgatatttaaagatgactcgctgcgttttaaagcggtttactatcgcagcaagattaaaaactatatttccagccaatcttatatgctgtgtgggacgggccgcgtttgtacgttggatcaaatgactagcgaggattggagtacaaccgacggtaactttaatctttacatctacaccaactcactcacgccggtcagaactcacggttttgagctggaagctaattatgacgccggattcttatttagtcgtctgtccttcagcaaagagaataccgaccagccgacgtctatcgccagcggtgttttcggcgcaggcgacaacgctgaaatgccggataaattcttgacgctggataccggactgcgcttcttggatgaaaaattaacggttggcaccattgttaaatataccggcaagacccgcaggatgagccccgcgttagattacgacgaatatgacggaagattgatgaaagaagaaatgtcgaatattccaaccattgtggatatttacagcaattatcaattaaataaaaatgtgatgctgaaagtttcggtgcagaatttgatgaacaaaagctattcggattcgctaaataaactgaacgcgatgccgatgcagcaacgggaagaaaacccaaataatactgccagaggaagaacctatttgtttggcggcgagatacgcttctaacataattagccctgcggttggcaccgagcgcagggcgattattcaaacgcctagccgttttttttctttgcctgctgtagccacttatccagttcattggcaaactgctggcgatcccgttgatttaaagtattaggcccgccggtttgaataccgctggcgcgcatggtatccataaaatcgcgcatatttagccgttcacgaatagtatccggcgtataacgctcaccgcgtggatttaaggctattccccctttttcaatgacctctgcggctaacggaatatcggcggtaatcactaaatcaccaatttcaactcgttgtacgatttcgttatcagctacgtcaaatcctgatgcaacctgtagggtacggataaattttgacggcggtgttttcaacggctgatttgcgaccaaagttaccatcatgccaacgcgatctgccgcgcggaagagtacttctttgataacgttcggacaggcatctgcatcgacccaaatttgcatcagcaggtttctccgtttgtttcatttgcccattctctgaccggcagaaaatcgcggtaaagcacggcttccgggctatcaggctccggttgataattatattcccaacgcaccaaaggcggcagcgacattaaaatagattcagtccgtccgccggtttgcagcccaaacagcgtgccacgatcccacaccagattgaattcgacgtaacgaccacgacgataaagttggaactgacgctcacgctcaccccaaggcagggttttacgacgttcgacaatcggcaggtaagcatcggtaaaacctttgccaacggcctgagtaaaggcaaaacaggtcgaaaaatctggagtgttcaagtcatcaaagaacagcccgccgatgccacgagcttcgttccgatgtttgatatagaaatagtcgtcgcaccattttttatacttgccgtacagatcttccccaaaaggctggcataacgctttagccgtttgatgccaatgcaccgcgtcttcttcaaagccgtagtagggggttaaatcgaaaccgccgccgaaccaccaaactggctgttcaccgggtttttcggcaataaagaagcgaacgttggcatgactggttgggatgtaaggattgaggggatgaatgaccagcgaaacacctagcgcctgaaagctacggcccgccaactctgggcggtgcgcggtagcggaggcgggtaaggtggcaccagacacatgagagaaattcacgccggcctgttcgaatactgtgccattaaccattacccggctgcgtccgccaccaccttcctctcgttcccactgttgttcggtaaaactggcctgaccgtctgcctgcgcgagtttggcgcaaatgtcatcctgtagtgataagagaaaggttttgataatgtttatgtctggtgtattcatcaggattatattcactggcttgggagtgttttaggccgctaagtataccctgattccagcctatagttgtaccgtcagtgtgggttcggtttatgactgctaaggaaaccgaatatcgttgcctactacgaaaattctgcctgaatccgttattatcgtcggtatcgacctcggataataggtgcgtcagcctgagccaactctcttaactatgtgtatccgtatcaatttattattgcgcgtgtagataatcccgcgataatcagaacatcaactttaattaacagcggcgaacactgatggaaattcgcgtatttcgacaagatgattttgaagaggtaataactctgtgggagcgctgtgatttattacggccgtggaacgacccagagatggatattgagcgcaaactgaaccacgatccggatttattcctagtggcagaagtgaatggcgctgtcgtgggctcggtgatggggggttatgacggccatcgaggttccgcatattaccttggcgttcatccggacttccgtggccgcggcattgccaatgcgctgatcagtcgccttgagaaaaagctcattgcccgcggctgcccaaaaataaatatcatggtccgcgacgataatgatgcggtgctgggtatgtatgaaaagttggattatgagattcaggacagtattagccttggcaaacggctgatcgtcgatcaagagtattagcggtgagtaagtcggaagcttaaaaataccctatcccgctgaattgatctgagggatagggcgttcaattatggcaatttggtaatatttctcacatcaacttctactgaattccagtctttatccacctttccttcgatttgtactttatctttcggcgtgatggtctggcctttccaacgtttggcgtcaatatctacggtgatcgtgccggtattgtcgcggaaagtgtagttatcgtggctcaaacgctcttcgatataaccttgtaaagtgacgcgagtgtcgtcacgcatggatttgactttatctacggttgtgattgccgcgcttgggccttggaaaccgccttgggttgcgggctgagtttgggttgttgacgggccctcaaagccaccggtagttggagtagtggtggtttgtgctaatgccggagtgctacataaagccagaaatgttgctgctgtgatgaacttcttcacgttatcgctccttcaatcaataaatgattatgtccgatagccggggaaatctcgtcctttgagtcgccgataataaccagaccgcaaaaaatgcttaaatatcgcgacctgagcggtcattatagtttaggaatataggttggcaataatccgatggctgcaaaatgaagagcatctgtgaagataagtggccgattaatatggcgggattacgaaaatatgagcttctttggtgcgactgtcataccgaggggctgtgactacggcacttttttagcaaactgaactccaaccagtgaatcattgagcgctgttctactgaaacgggctttgtctgtgggccgaaagcaagtgattatcggtatcaccgtttttgtcagttaattttaaggagctataccatgaatttacgcccgttattgcttgggttgccaatattgctgacggggtgttctgcgctctcaaatttttcttggtcgagcctgtctcccacgaattggtttggtagtagcctgcgggtgaccgaggaaggcgtagggagtattactgccgccacggcgatgaatcaggatgcgattaacgaaggtctgaacggcgattaccgcttacgcagcggcatggctggcaatggcgatagattaatttctttttatcaggcgatgaaggacgctcaggttaaactgattatttcaggccagcctaaaggcactgtcgaacgcattgacgttatggacaaaaatatttccagccagtggggcgtaaaactggatacaccatttagcgatatctttgagcaggcttatggtgcctgccagaaagctaccggtgatgatgccgaaagcgtagagtgcgtggctccagaaagtaaacatgttagttacctgtttaccggcatttggcatggtccggaaggattaatgccatcaaacgacgcactgaaaaactggaaagtgagtaaaataatctggcgtgctcaggctcattaatcttagccgtaatgggattattttaacgtcgtaaaggctcctctgtcggagcctttattatttctggggaaaaatcacggtggtagccgcctgctagcattggggctattcctgttttattttgcgctgacgcaatgtaataattaaggcgtcgcgtatgatgtcgaacagaatataaagttgggggaagaaccccaactcccagtttttattgaggaagaaatcatgtctcaggttcagagcggtattttgttggaacattgccgttttgctatttttttggaagcaaaaattcagggtgaactggatgacatccgtagcggttctaaaatattctgccaatcgttggtggagttacaacaacaataccctgatgcacatttaggcgcggttattgccttcggttctgacgtatggcatgacctctccggcgggcagggcgctgctgaactgaagccttttgtgccgttgggacgaggtttggcaccggcgacccagcgtgacatgctgatccacattcagtctctgcgccatgatgtgaacttctctctggctcaggctgcactggccgcattcggtaaaactattgctattgaagaggaaacccatggtttccgttgggtggatgaacgagaccttaccggctttattgacggtactgaaaacccgcagggtgataaccggcctgaagtcgcggtcattgccgaaggtgaggaagacgctggcggtagctacgttttggttcagcgctatgagcacaacctgagcacctggcagcgccaaccgcaggaaaaacaagagcaaatcattggccgcaccaagtcggatagccaggaactgccaccggatcagcgtcctgatacctcgcacgttagccgggttgatttaaaagaaaacggtaaggggctgaaaattctgcgtcagagcctgccttatggtactgccagtgggaaacacggtctgtatttcatcgcttattgcgcacgtttacacaatatcgaacagcaattgctaagcatgttcggcgatctggatggcaagcacgaccagttgctgcgttttagtaaggccgttaccggcagctattatttcgcgccgtcgctgactaaactgctgtcgctatagttatagtattttctgcaaaaaaacgtataaaaaagccggattgctatttagcaccggctttttttatagctcaatggcagtggtctacatatttcttgggaagattacagcgccactgcgtcacgcattctgttcagcacagtttgtttttgttctttagttagagcacgtaacggcaaccgcggattaccagcatcaataccgtgtaattgcatcgcagctttacctgcggctacgccacccaactctactagtacacgaattagcgcaatgacctgatccatacttctttgcaccgcagcatggttaccagcgttgaagtccgcaatgattttatggaacagtggagccgcgtaattataagtgctgccaacggcaccaatagcgccaacagccaatccgcccggcagatgttcatccacgccaaacggaatatcaaacttgccaccgctaacccgtaggcagcgttggaattcatacagatcagcattattgaatttaatgccggacaggttaggaattttagactcggctttaattaagaactgttccatatccaaattcacgccagacatcccggaatgataatagtaaaagccttttgacggagccgccgctgcaattgtctgacaataggcaattaaatcatccagattacctggcttgaagaaacaggggccaatggctgaggtcgcgaaaatatccagttcttccgcatggcgagacaaatccaccgcatctttaatactgagagcgcctgtgtgcagcgtaatgctcaattgtccctgtgcggcagcaacccagcgctcggcaatttttttacgttcttcaacggagcaatgaataccttctcccgtggtgccgcaaacgtaaacaccttttacgccatcattaatcagatgctctgcaatctggtcaatgaccgggtaattgacttcaccgtgctcatcaaacggagtgtgcggtgcagcgataaggccggttaactttttcatacttatccttaaactcgaagagatagcagggggggagtttgtttatggaggataactccgccgttaaaattaagcacgtcaggaagactaacgctgcttgatggcatcggtgaaccagccgcagatatgttcaatgcgggtgatggcggagccgacggtaacggcataggctcccgccttaatcgcggcggcggcgagcgccggtgaattatagcgaccttcggctatcacccggcaaccgacctgagccagttggtttaccagcgctaaatccggctcagacggcgtatttttcgaggtatagccggataacgtggtgccgataaaatcgacgcccaagcggtgagcgctgataccgtcggtatagtcagaagcgtcggccatggataaacgaccagaagctttaattcgttcaaacagcatttccaccgaaacggggcgctctcggtgggttacatcaaaagcgataatgtcggctccggcggcaaccaatgcatccacatcttccagccatggggttattctgactgcgcagcccggcagatctcgcttaacaatgccaataatgggcgcatcggtcacttcacgcaccgctttcacgttggcggcaccttcaatacgcaggcctacggcaccgccgtccagcgcggcttgcgccatggcggcaatcatttcggggcgatccatggcgccgttgggaaccggttggcatgaaacgattaatccgttctggagctgatggcggaggtggattggattgctcacggtttttaactccggtattttatcttaaatgaagttttactccatcatgttagatcttttattcgacgggcgcaacgactgaacgagcaaaatgtgaacccgtaggaaagggtgccagtcccttttcctttggccgcattttctgtttgcctattagagtgagttgagatagtttcattcgaagtaaaactccattttattttatttttcggagtgtgatcggtgggcgtagaggctgaggcacagagaggcagcggtatgaagcagggcttggtactggatattggtggcactaaaatcgccgccgcgcgagtgaatcacaaaggcgaactgagtcaacggcagcaaattgccactccgcgaggagacgcagaacggttgcaaagaacgctggaacaattgattgaaccccatcgacaacatgttgattttgttggtgtggcttcaacggggattgttagtaatggttatctcacggcgctaaatcctgccaacctcggtggcttagctcattttccactgcaagcttgtattgaaggcatcgcgaatgtgccttgtgtgctgctaaacgatggtcaggccgcggcgtgggcggaatatcagactttgtctattgccgtgaataatatgatgttcgtgacggtttcaaccggcgtgggtggcggtattgtcctgaataataagttacataccggtaatcaaggattggccggccatattggtcacaccttggccgatcctcacgggccgatgtgcggctgtggtcgacgcggctgcgtagaaagcgttgcgtccggtacggccattggcgcagccactgctgcctgggctgagccggtcactgccgttgaggtatttcgcatggcaaaaaatggccagcggcaggcagaacagattattgacgattcagcggcagccattgcccaaatggtggcggatatgaccatggctctggatctggaaatggtggtgatcggcggtagcgtggggttagccgaaggctatctcgatagagtgaggctggcgcagaaaacgttaccggccatctatcgtgcgcctttgcaggcggctcattaccgccaagatagcggtttatcgggtgcagcgctgtgggccacagccacgctgtaatcaatagtgcaacctagtgacgaataattaagattatccgttgggatataaggcataaaaatgattcacggtaacttaaatcagcccgaattttttggcggctatccggaaagtattcaaatgatactggcgtatttgtcggaaataccggttaacgaattgtcctgcggtcgtcatgatattaacggcgaggatatttttatgaatgtgatggaatttgacactcagccagcggaaagtaaaaaagcagaaatgcatcttgtctatgccgatgtacagctgctcattcgcggtgtggaagggattgaatattcaacccaaacgccatcagaacatctggagccttatcaggctgaggatgattatcagcttattgccgaaattccggataaaagccaattacgtatgctccccggtatgtttgcggtattcctaccgggtgagcctcataagccgggctgtcaaattatcggttctggtacgattaaaaaactggtggtgaaggtgcattgccgcctgctggacgacactctattatcctgatttccctataataagaaccttagttatctttgacattttccccggccccccggggttttttattgtttctaccgccgctctccggcctcatttgtcttcacgaagcctgccaactatgtaatcatgcccaccaaatttaaactcaccctgaggtgtttgtgatgaaaacgggtactccacgtttccagcctggaaaaattcttgatgccttgggggcgatgcaaaatagcctgactcgttctgctcagcgtattgcggcctatattctgacggagccggctaaagtgactcaggtttctattgctgaattatcctcattaactcaaaccggcgaagccaccattattcgtttctgccgcacgctgggctataagggattccatgatttcaaaatggatttggccatcgaagttgcaaccagcaatgcgtcaaataatgaaaatagcctgttagacgcggatgttcaggatagcgataataccctgactattggtagtaaattgcaggtggcaattaataatgtgttatcagaaaccctgaatttgctgtcgctggaatgtgttgaaaaagtggttagcttgctgcgtccggcagacagaatctgtatttttggcgtagggtcttccggtattactgccgaagacgccaaggcaaaattaatgcgtatcggcctgcgagtcgatgccgcaaccaataatcattttatgtatatgcaggcttcattaatgaaagccggtgatgtcgctattggtattagccattcaggtacttctacagagaccgtagaggcattgcggctggcaaaacaggccggagcgacaaccgttgccttaactcataatatggggtcgcgcattaccgaactggccgattatgtattaatcaatggcaaccgtcaggggcaattacaaggtgactctatcggcaccaaaattgcccagttatttgtgttggatctgatttatgccttattggtgaaagctgatcctgagcaggcggagagtacgaagcgtaaaaccactctcgccgttagccagaacggataagctgcaaaaaaatataatctcctttgcaaaacgcacttctcccgtgaataagccatctctacgttatatctacggtggcttatttggttcttcccggtaatacaaacatttcgccatctttgtcacgttttctacacattgtgattgaaaagagagagtgatcttatacactcaattggagttttactcctttttgtgttttatttcggggtttaactgcaaaaaacataagcgtagctatcagcgcaattagctgctttaaatatgcgttaaaacaatgagatgctgattgttaaacgcgtggccgggataatagatttccgtcagaggcttatcaatgacgggggagaacgccttaatatgaatacttcaatacagcagcgctggtataaacagctgacgcctgctcaatggaaggcatttattgccgcatggatcggttatgccctggatggctttgacttcgtactgatcacgctggtgctgaccgatataaagcaagagtttggtttatcccttattcaggccaccagtttaatctctgcggcatttatttcccgttggtttggcggattagtgctgggtgctatgggcgatcgttatggtcgtaaattagccatgattaccagcatcgtcctcttttcctttggtacgctggcatgtggtctggctccgggttataccaccttatttattgcccgactgattatcggtattggtatggcgggagaatatggctccagctcgacttatgtcatggaaagctggccgaaacacatgcggaataaagccagcggcttcctgatttccggtttctccattggcgccgtattagccgctcaggcctatagctatatcgttcctgcttttggctggcggatgctgttttatattgggttgttgccgattattttcgctttgtggctacgaaaaaacctgccagaggccgaggattgggaaaaggcgcagaatcaatcggctaaacagaaacccgctaaatcgctaaatatggtggatatcttgtaccgcagtaacctcagttacctgaacattattctgacggtgtttgccgccgcagcgctatatttctgcttcactggtatggtttcggcacccgttgtggtggctctgggaattttatgcgcggcaatatttatctactttatggtgcaaaccagtggcgatcgctggccgacgggcgtgatgctgatggtggtggtgttctgcgccttcctctattcctggccgattcaggcgctgttgccaacttacctgaaattggagctgggttatgatccacatactgtaggtaatgtgttgttctttagtggctttggcgcggcggttggttgctgcgtcggcggttttctgggcgattggctggggacgcgtaaagcctatgtagccagtttactcgtttcccaattgctgattatcccgctgtttgccatgggtggcgggaatattatgctgcttggcgcggtgctgtttttacagcaaatgctggggcagggcattgcgggactgttaccgaaattattgggcggctatttcgataccgagcaacgcgcagccggtttaggctttacttataacgtgggggcgctcggcggtgcactggcaccgattctgggcgcgtctattgctcaacacttgagtctgggaactgcgctgggatctctatccttcagcctgactttcgtggtgattctgctcattggttttgatatgccatcgcgcgttcagcgctggattcgtccgaaaggattgagaatggtcgacgccattgatggtaaagctttcagcggtgccaagggcaatgccacggcgcagccagtcacgctgaaataatccctcgcgcgtgaggttaaccacggcgctttcacaaagtctggctgatatcagccagactttcttatttttgtcagtcgcggggaagaggcggttttgctgccttagagcatttcatacttgcacatcactaaacggtatataaaagcgttacagctatatgcctagttataaatacactgatcatcattaaggcgttatcagcccggcgaactcagtgactaaggtgcagaatgaaacagaacttgatgaaaaatggcaggctggccggatggtcaaaagcggctctgttgagcgctttggtattgggcagcgccacggtttctgccaccgagttactgaacagctcttatgatgtttcccgcgaattgttctccgcgctgaatccgggtttccagaaacagtgggaagctcagaatcccggcgataagctgaccatcaaacagtctcatgccggctcatccaaacaggcattggctattttgcaaggtctgaaagccgacgtagtcacctacaatcaggttacagacgtacaaatcctgcatgatcgcggcaatttgattccagccgattggcaagcgcgcttgccgaataacagttcacctttctattccactatggcgtttctggttcgcaaagataatccgaaaggaattcacagctggaatgatctggtgcgtgaagacgtcaagctggtgtttccaaatccgaaaacctcgggcaatggccgttatacctatttggccgcttggggcgcaaccagtcaggccgacggcggtgacgatgctaaaacccgcgactggatgaaacgtttcctgaaaaacgtggtggtatttgataccggtggccgtggcgcaactacgacttttgtggagcgcgggctgggcgatgtgctgattagcttcgaatcagaagtgaacaatattcggaaagaatacggcagcgacaaatatgaagtcatcgtcccgccggtggatatcctggcggagttcccagtggcgtgggtagataaaaacgtcgtgaaaaacggcacggaaaaagccgcgaaagcttatctgacctacttgtacagccctgaagcgcagcaggttattaccagctttaactatcgcgtttatgacaaaaccgccatggctgcggcgaaatcgcagttcccggaaacccaattattccgcgtggaagaacagttcggcagttggccgcaggtgatgagcacccatttttccagcggcggcgtattggataaattgttagcggaagggcaccagtaatgttgtcggcgtccagcaagcgggttctgcccggattcactcttagcctcgggagcagcctgctttatacctgccttatcctgctgttacctttgagcgctctggtgatgcaactggctcaaatgagtctggcgcaatactgggaagtgatttccaatccgcaggtggtcgcggcttacaaagtcacgctgttggccgccggcgttgccagcgtgttcaacgccgttttcggtatgctaatggcgtggattttgacccgctatcagttccccggccgcagtattcttgacggtctgatggatttgccttttgccttgccgacggcggttgctggtttaacgctggccacgctgttctccactaccggttggtacggtggttggctggcacagtttgatatcaaagtttcttttacctggctggggattgcagtagccatggcttttaccagtttgccatttgtggtgcgaaccgtgcagccggtgttggaagagttagggccggaatacgaagaagcggcagaaaccctgggtgccactcgttggcagagtttccgtcgggtggtcatgccggagctggctccggcgctgctggccggtactgcgctatcatttacccgcagtttgggggagtttggcgccgtgatttttatcgccggtaatatcgcgtggaaaaccgaagtgacctcgctgatgatttttatccgcctgcaagagtttgattatccggcggctagcgccattgcctcggtgattctggccgtgtcattggtgttgctgtttagcatcaataccttacagagccgctttggtcagcggattggggggcactgatggcggatatttcagaatttaacggtggtgctgttcgcccgcctttcaactggggaaaatggacgttaatcgccattggcgcggtgttttccattttgctgttagtgattccaatcgcctggatttttatcaccgcgttctccaaaggaatagaggtggtagggcagaatttagccgatccagacatgctgcatgctatttggctgacggtgttagtcgcgctgattaccgttccggtgaatctggtgtttggcgtcgtgatggcctggctggtgacgcgttttcagttccccggtcgccaattattgatgacgctgattgatattccctttgctgtctcgccagtggtagcgggtctgatgtatttgctgttttacggttccaacggcgtggctggcggctggctggatgcccatgatattcaactgatgttttcatggccgggaatggtgttggtgacggtatttgtcacctgcccatttgtggtgcgggaactggtaccggtgatgatgagtcagggcagccaggaagatgaggctgcagtattgctgggtgcttccggttggcagatgttccgtcgcgtcaccttgccgaatatccgctgggcgctattgtacggtgtggtattaaccaacgcccgcgccattggtgaatttggcgcagtctccgtggtatccggctcaattcgcggtgaaacctacaccttaccgctgcaagttgaattgctgcatcaggattacaacaccgccggtgctttcactgcagcggcgttactcaccctgatggcgatagttaccctatttctgaagagcggtctgcaatggcgcttagcgcgtcaggttgttcgcctcgaacaggaggaaaagcatgagcattgaaattaacaatatcagcaaatattttggtcgtaccaaggtattgaacgacatcgcgctggatattccttctggtcagatggtggcactgctggggccttcgggatcgggtaaaacgacgttgctgcgaattattgccggtctggaaaaccaaaatgccggacggctgagtttccacggtactgacgttagccggctacacgcgcgggagcgccgggtgggttttgtgttccagcattatgcgctgttccgccatatgacggtgttcgacaatattgcgttcggcctcacggtattaccgcgccgcgagcgcccaaatgcgacggccattaagcacaaagtcgaacagctactggaaatggtacagcttggtcatttggcgaatcgttttccttcccagctttccggcggtcaaaagcagcgagtcgctttggctcgcgcgttggcggtagaaccgcagattctgttgctggatgaaccttttggcgcgctggacgcgcaggtacgtaaagaattacgccgctggctgcgtcagctgcatgaagagctgaaattcaccagcgttttcgtgacccacgatcaggaagaagcgatggaagtggcggatcggattgtggtgatgagtcagggcaatattgagcaggtgggcacgccggatgaggtatggcgcgatccggccacgcgttttgtgttggaattcctcggtgaggttaaccgattaagcggtgagatccgcggttcgcagctttacgttggcgctcaccactggccgctggatctggctcctatgcatcaggggcgcgtcgatttgttcctgcgcccgtgggaaatggaaatcagtactcaggccggcgctcgctgtccgctgccggttcaggtactggaggtcagcccgcgcggccacttctggcagttaaccgtgcaaccgataggctggcatcaggaacctatcagcgtggtattaccagaaggtggcgtagctgcgccagtgcgaggcaatcgctactacgttggcggattgaacgcgcgactctattctggcgatcaattactgcaacccattgctatggcgcaaagcgcctgatagtttttgctcaccgcatataatcaggtggcctattggccgcctttttgctttgtccgaacgtggcgtaaaactcatgccatcgggcacttttattcgcttaataggttaataatgtgacaaccctggaacagtgtatcggtaataccccgttggtgaaattgcagcgtctgacacaagggctgaacgccgatgtgtgggtcaaactggaagggaataatcctgccgggtcggtaaaagatcgggcagcgctgtccatgattcagcaagcggaattacggggtgatattcatgatggtgatgtattaattgaggcgaccagtggtaacaccggcattgctctggctatgattgcggcgatgaaaggctaccgaatgaagttactcatgccggaaaatatgagccaggagcgtcaggcggcgatgcgagcctacggcgctgaattgattctggtcagccgtgagcagggaatggaaggcgcgagagatctggcgctggagatggagcggcaagggcagggcaaggtattggatcaattcaataatcaggataatcctctggctcattttactggcactgggccagaaatctggcagcaaacggcaggaaaaataacccatttcgtttccagcatgggtaccaccggcaccatcaccggtgtaagtcgctatttgaaaagccagaatccgcaggtggaaattatcggtctgcagccggcggaaggcagcagtattcccggtattcgtcgctggtctccggcttatttaccggggatttttcgtccagaactggtcgatcaggttttggatattgggcagactgacgcggagaaaaccatgcgtcttctggcggagcaggaagggattttctgcggtgtcagttccggcggtgcggtggctggcgctttgcgcgttgcggcagaacgtccgggcgcggtgatcgtggcgattatttgcgatcgtggcgatcgctatctttctaccggcgtttttgattagtgacaccgttaaatatggcatccgaagttagcgctacacttcggatgcgtttcagctactgctggcgtaaccggttgccatcccaagataattgtctaatggacgccactgccgcgccgttatcggtttccccgccaatcagccagatattatctccatcctgaatagaaacgccgtaacccaaaggttgaggtaatttcccgacgattttccattccccgttcaccaatccatagacttcgtcacgccagttttttttcagtccttgatgagcataaagctgaccggcgttaaattgtgctctggcaccggggaagttggctccgcccgctaccaatatggcctgatggctaataccagcaaaagctccggccaacccttcctgttgcattttatcgctggctggaatcagatcgggcaaccgcttccagtgcatctgatcttgttgccatgtcccttctagcgcttcggcggttcgtaatcctggtttgacttctccgttaatcaaaatgactcggttttgccgagtcgcgatagcagagcctgcgcggccaaattgaggcaactggccgccggatcgccattgattattcgtcgggttataaatcatgatttcccgattgaagaaatagctctccggtgcctgattgaaataagtctgagccacggcatctttttgttgcgccgtttgagctgcgcttaaatcctgaaaatagccgtcaaatacctgcttattcaccccacctataacccatgcccgttgaccatcaagggaagcaatagcggtgccaaccaatccctgaggtgcgcgggttggcactttttcccaacgattgtccgatggatcgtagcgataaacttcggttaaagcttgtggattggccgcgttttccgtggctttaccgacgccaccgaaaacataaagcttgccatcaagcataacggaaaccgcctgttctcgcggctgagcggggaattcagctattttttcccagattggtgatgtatgagcaatatctatccgaaaccagttcttacctgcgctacctaaacccacgtaaatgaccgaaccatttatggcgccagtaccgttcttgaatgacaaaggaacatcaggtaaagccgctgcctgactaagggaaacagagcctattgccagcaaagcgtaaagaaaacctcgagttgccttgaacatgatgccattcccttatccagagtttgagtattattagaatgtttaactccattattaaaaataaaacggagttaaactattatcaataacatacccagtccgtcgataaaatcgcaatgggaaagcgcatttttgtgaccgcttaccgaaattactctcgctcaagggcacggatcggatccatttcggcggcacgtttcgccgggaaaaagccaaaaaccacgccaatcaggctggaacagagaaaggcgctaatcatggaggtcgcggagtacaccatagtaaaactggtgctgaactgactgaataacccgccgatcgccagcgacaacaacacgccgaggcaaccgcctaaaagacagaccaataccgcttcaatgagaaattgctgcatgatatcgctggaacgggcgccaacggccatgcgcacgccaatctctttggttcgttcacttacggaaaccagcatgatattcattacgccaatgcctccgacaatgagcgaaattaccgcaatcatagataccaatagcgtcatggttgctgtggttttctcgatggtttgacggatactatcggtattcatcacgaaaaaatcctgattgccgtgacgctgagtaagtagttttatgacgccctgctcagcgttagctaagtcaatatcatcgtttacccgaacggtgatgctctttaagtaggactgaccgagcatacgcttcatcgccgtggtatagggaatccagacgttcagattttcatcactgccaaaaccgctctgttttttagccgccacgccgataatccgacaggggagggaaccgagtaaaatcacctttcccaatggattttctccgtttgggaacagtttgttacgcgtgttctggtcgatgacaacttcttgcaacaggttgtccacgctggtgcgggtgaaggccattccctgatcgatttggtagccgcgcacggtgaagtattgctcgcccacgccgttgacggtaccggataccgattggttgccgtagcggaaaatcacgctggtagacagcgtgggcgtaacgctgtgaacgtaaccttgctgggctaatgcatcagcatcggtggcgcgcagcgtttgaatcgctgccgaacgcctatcgccaaaatccttgccagggaaaatctccagcgtactggtgcccatcgcgctgatattagccagcacttgttgctgagagcctttccccagagcaaccactgaaaccaccgatgcgataccgataataatacccagcatggtgagaaacgtgcgcaatcgttgggcggccatcgacaacagcgccattttaaaggcttcttgcagtcgatcgcgttgcctcagccagcgagagggctgaatcgatgtttcgatcgtggctggcaggtttttctccagattttctagcgtatcaggttccagactactttgtgagtcgcggtcagcgatgatttctccatcacgcagctcaataattcgctgagcatgttcggcgatgcgcatatcgtgggtaacaatgaccaccgtatgtccctgagcatgtaggcctttgagaatactcaaaacctcattaccactgtgggtatccagcgcgccggtgggttcgtctgccagaatgacttcgccgccgttcatcagcgcgcgggcaatgctaactcgttgctgctggccaccggaaagctggctgggatagtaatccaaccgttcgtttaaccccaaacggccaagcaaagccgccgctcgccgacgtcgtatttcccgttgactaccggcatagatagctggaatttcaacgttgccctgggcggttaaatctcccagtaagtgatagcgttggaagataaagccgaagtgttctcgacgtagcttcgccagctcgtcattactcatcagttgcggggcttgtcctgccacccaatattcgccagaactgggtttatccaagcagccaagaatattcatcagcgttgattttcctgagccggaagccccgacaatcgcgaccatttcgccctgatgaattgtcagattgatgtttttcagtacctgaacgtgctgttcgccgttgatgaattgacgacaaacattatccagatgcagcaagatcgtttttgattgggcgctatgcattatcgcatccccatcggtaggcccatgcgctgaaccttactggtcattgcagtgccgctggattggctgataatcaccttctcgccggcctgaagtccggaaatcacctgtgcgtccacattgttattcaatccaatggtgacatcacgcagactaatattccctttttcatcaaccacttgaacctgattcttattgccccgatgttcaatggcggtagaaggaatgacaatggcgttttctgctttgtccaacagaatatatacctgtgcagtcatggaaatccgcagttcgccattgggattggccacgtcaaacaggccattgtaataaatggctgtgttggtggacgatgtactgctggcgctggatgaggtgctggtatcgtcgtcgttgattgagtcgggagccggttctacggcgcgtagcgtggcgctgaaacgttgctgcggctgaccgagaatagtgaaatatactggcataccggttttgactttgatcacgtcggcttcggaaatttgcgcttcaatggtcatggtatccagacgtgcaactttaatgatggtcggtgcgctttgtaccgcgttaacggtttggccttcttccacgggaatagctaccacggtgccttcaattggcgaggtgattttggtgtaacccagattgagctgcgcggtgctcacggcgattttggcttgagcgatttgagcgtccagcgcttcaatttcggattgagtggcagctagagtggctttggcgctgtcataatcggcttgagtgcccacccccattccgaggattttctgttggcgctgataggtttggcggttattttccagcgtagcctgtttggcggcgcgctgcgcctgcacgttttttaaagcggcttccgcgtctttcaaagcgttttgttgagtcagatcgtcaatttcggccaccaactggcctttttgcacttgttgaccaagactgacatgtagggctttgatttgcccagaaacttgcgcacccacgctaacctgttttttcgctttgatggtgccatcagccagaacggtttgctccagattgccgatttgagcggtggcggtgatgtaagcgggcttttctggcgtagagaaaaataaaaaatagagaacgaaacctgccgccagtagtgccacgagcagccatagcgcccgtcgtttggtaccaatgagttgttgcataattgaccaaatttccttgagtcattctaagacaaaatctacagagaaatactgagtcataatttaccgccaagcaccgccgttaggggtaaagcggattttaggaatatgtaaggattcagtaaaactggctgcgctggcgataaattggcaggaaaataggtgaaatcagttaagggagaaatatatgaaaattctattagtcgatgatgatattgagcttggctcaatgctgaaggagtacctgagcggcgagggttttcaggctgatttggccgttaccggtaaatccggtattgatggcgcattatccggcaattataccgcgctgattctcgacattatgctgccggatatgagcggaattgacgttttacgacaggtgcgccagaaaagtcgattgccgatcatcatgctcaccgccaaaggggacaatatcgatcgggtgatcggtttggaaatgggcgcagatgattatatgccgaaaccttgctacccaagggagctggtggcgcggctgcgggcggtattacgtcgcttcgatgagcggccagagcaaagcagcggtgactccctgctgacgctgggagcgctgacgttgaatcccgctacccgcagcagccagtggcagggtaaagcttttgatttaaccgcctctgaattcaatctgctggaattattgctgcgttcgccggatcgggtagtgactaaagacgaactgtcggataaaggtctggggcgaccgagagaagcctatgatcgcagtgtagatgtgcatatcagcaatattcggcaaaaactcagccagttgccgaataataacctcaatattgaaaccgttcgcagcattggctatcgcattaaataacggtttttcaggatatgattatgcgtggacgcctgttttggaaaatcctattgggtttctggtttacctttattttgatgacccaactgctttgggtgattttttctttctatggcaaccgacacgagccgccggaaaacggcatgatgcgacagattgtggcccagcagatgaaatccgccgcctcggtgctgagcagcggcggtttgtccgcgctggaaacgatgatgtccggctggacggaaccggaaaaaaccttgttttcagtgcgacctgaatctgcggttccgccggtttctgctgcaaaaacactcaccgattcaccgtcacacctcgttaagtgggctacaacacctgagggcgataaatatcagctaagttatgattttgacggtatgcgggcggtttatcatccaaaagggaaaagggatcagattctgaacattcctaaacccttattctggatgggcgcattgggcgggctatttttcagcacttttttggcatggaatctaacccgtcccatgcgccagctgcgggatggctttgagcgagtcgcgcagggcgatcttgcggttcgcttattaccgatgatgcgtcgccgccatgatgaattgaccgaagtggcacgtgactttgactcaatggctgagcgtttacaggcgctagtgagcgccagagagcaactgctgcacgatgtttctcacgaattacgctcgcctttggcgcgtttgcaactggcgattggattggctcatcaaaacccaggaaacgtgaatacttcattgcaacgcattgaacatgaagctgaacgtctggataaaatgattggtgagttactggcgctttctcgcgcggagaatcaaacgctaacccatgacgaagaatatttcgatctgtacggattggtagaagcggtggtgaatgacgcacgctatgaggcgcaggtgccgggcgtggagattgtgttacaggcggagcctgaaagggaatatacggtgaaaggcaatgccgagctgatgcggcgcgccgtcgataatatcgtgcgtaatgcgctacgtttttctacccagggccagcaagtaacggtcaggctttcacagatagaaaaacagtatcaaatcgaagtggtcgatcaggggccgggcgtggaggaaagccgcttatccagcatttttgatcccttcgtacgtgtgaaatcggctatgtcaggcaaaggttatggcctgggattagcgataacccgaaaagtgattctggcgcacggtgggcaggtagaggctaaaaatggtgagcagggcggcttggtgattcgtttacgtgtcccgcagtggtctacgcactagcggtaaaatactaagagcgtagcatccgacaataaaaaacggcgcctaagcgccgttttctcatccgcaatattattacttcttgatacggataatcggtgtttcaccgacggtcacgctgccggaaagtttaatcagttctttgatctcgtccatgttagagataacaaccggagtcagggtagacttggctttctcttccagcagggccagatcgaactcgataaccacatcacctttcttcactcgttgaccttcttcagcgatgcgtttgaagccttcgcctttcagttcaacggtatcaataccgaagtggacaaacagctcgatgccgctgtctgattcgatagagaatgcatggttggtttcgaaaattttaccgatggttccgtcaaccggagcaaccattttgctgcctgatggtttaatagcaatgccatcaccaacgattttttcggcaaaaacaacgtctggcacatcttcgatgttgacaatttcgccagacaacggcgcaacgatttcgatagtgccgctgtctttcttatcatctgaaacaaatgatttcagtttatcgaacaaacccatgatcttctcctaagtatttatattggacagcgttccagtctcatggaattagcagagtgttttctcttcgatgaacgtattaaccaagtccatcaattcttgcgccgttggtttagataacgcttcagcagccaacgccttcacatcttcgaaattcgtgttacggataattttcttgatgcgcgggatcgagattgcactcatgctgaattcatccagccccatgcccaataacaacagtgtagcacgttcatcgccagcaagttcaccgcacataccggtccacttaccttcagcgtgagatgcatcaataacctgtttgatcaggcccaataccgcaggcgacattggattatagagatgagaaatcagctcattgccacgatctactgccagagtatactgagttagatcgtttgtcccaatactaaagaagtcaacttcttttgctaaatggtgcgcgatggttgccgccgctggcgtttccaccataacacccacttcgatagattcatcaaaggctttattttcttcacgcagttgagctttcagcatctccagttctgctttcagtgcccgcacttcttcaacagaaatgatcatcgggtacatgatgcgcagcttaccgaaggcagaagcacgcagaatggcacgtaattgcgcatgaaggatttctttacgatccatggcaatacggattgcacgccagcccaagaacgggttttcttcttttggcaggttcatgtacggcaggtctttatcgccgccgatgtccatggtacggacgataactgcctgagagcccatggcttccgcaacggctttataagcctggaactgctcttcttccgtaggaagagagtcgcggtccataaacaggaattcggtacgatacagaccaacgccttcagcgccgttacgttcagcaccggcgatatcgcgaacggtaccgatgttggcaaccacttcaacctgatgaccatctaaagtgatagccggcagatctttcagtttagccagatcgtttttctcggtgatgtactgagtattcaccgctttcaattggtcgatcacatcgctggttgggttaacgtaaatcttgttgttcaccgcatcgaggatcagataatcgtcgttcttcacctgtttggttacgtcgctggtgccaacaattgcaggcaattccagggagcgcgccataatcgaggtgtgggaagtacggccaccgaggtcagtaatgaagcccagaactttatccaggttcaactgcgcggtttcagacggcgtcagatccgttgcaaccagaatcacttcctctgaaattgcccccaaatcgacgatggtcaggccgagaatgtttttcagcaggcgtttaccgatgtcacgtacgtcagctgcacgttctttcaggtactcgtcatccagttcttccagcgctttcgcctggccttcaatgacggtatatgcggcagcgtcggctgaagcatgttcgtctttgattagggctatgatttcctgctcaagctcttcgtcttccaacagcatgatgtggccttcgaagatggcagctttctcttcgcctaggctctcgccagctttggtcttgatcgcttctaactgttcagatgctttcgcccggccagatttgaaacgctcgacttcctgctctacctggtcagcagagatttttttccggttgatgacaatctcatcttctttcagtaaaagtgctttaccaaaagcaatacccggtgaaactaaaatgcctgaaatcataaccctaccttactcttgactggttttaacttaaaagactgggcttcttttactcaagctctgccatcagttttaccaggtgttcaacggctttctgttcgtcatcaccttcagcagagatggttactacagtaccttgggtcagacccagagtttgtagtttgaacaggctcttagcgctggcgcttttgccattggaagtaacggtaatttcagaagcaaaagctttggcttctttaacaaactgtgcagcaggacgggtgtgtaggccattcggtgcggtaatagtaacttcttgctggaacattgtgtttccccaacttattttggatttatgttgtggagctaaagtctagtgtaatttcctaactttagcctgtattggctagcgccagactatggaacaaaaagacaagctctgatgcaacaggaaaccagagtcatcgccaaggaggataaccttctcttcgcgttgtgtctccaatccacattatgtatgtcgcatattactcttttcagcaaaatgattaaatcgattcagctaaagtaacacacgttgtgggattaatttcacgcatcaaaataattgaccggttaaatactaaacccagagggtaaaatcaatcgttatgtagtgaaaaatttgacgtacaccacaaaaaaagcaccgcgagggtgcttttttagcatttagtgcgaccgtaagccttactgttgcagttcttgttccgtgaacaaatctgcgaacaaagcggtgctcaaatagcgttcacccgaggaaggaagaataaccacaatttccttgtcagtaaagccagcttcttcagatagcttcactgcggcagcaacggctgcaccggaagaaataccggccagaatgccttcttcttccatcagcctgcgcgccatggcgatagcttcatcgttggtaatcagtgcaacacggtcgattaaggataaatccaggttgcctggaataaaaccggcgccgatgccttggattttgtgtggcccaggtttgatttcctgaccggccagcgcttgggtaattaccggggaatccgttggttctaccgctaccgtggtgatggctttgcctttggtttttttgatataacggctaacgccggtcaaagtgccgccggtgcccacgccagcaataaatacgtctacgccgccgtcggtatcttcccagatttccgggccggtagttttttcatggatttcagggttagcgggattatcgaactgttgcagaatcagataacgctgcgggtcggtagcctgaatctcttcagccttggcaatcgcacctttcatacctttcgcgccttcggtcagtaccaaattggcacctagcgctttcagcagtttacggcgttcaatactcatggtttcaggcatggttagcgtcagtttgtaaccacgagcggcggcaacgaaagctagcgccacgccggtgttaccgctggttggctcaacgagttcgatacccggcttcagcacgccacgtttttctgcgtcccaaatcatgtttgccccgatgcggcatttgacgctaaaacttgggttacgcgattcgacttttgccagaacacgaccgttgccgatacggttcagtctaactaacggcgtatggccgattgttaaagaattgtcttcatatatcttgctcatagcctgtcctttaactctatgaaaatgtaggaaacgttcaaagcatacgctaacaggtcggctatggaagtaaagaattggtatatctatatgtgattaggaaataagtttttccatcaatgaaaagggcgcgaaaaccgcgccctgacaggctttagcgactaggctgaacaaactggtgacggtaacgatccacccacatcgcggtggctccgcacacggcaacgggcataatcatcagattcagaaacggaatcatggtgaatacgctgaccaatgcgccaaactgcaaattatcgactttattttgccgtagggcgctgcgcatgtgctgaaagctcactttatggttatcaaaaggataatcacagtactggattgacagcatccaggcgctgaacaggaaccatagcaccggcgccgccgtctggcctatgccgggcaccagatacagcaacaacagcactaaggcacggggcaggtaatacatcagcttgcgccactctcgcgacataatgcgcggaatatctttaacgatgccgaggattccagtgtctggcagcggttttccggttagctcgccctctaaatgttcagcgagtaagccgttgaacggtgcagcaataaagttggctaccgtgctgaacaaatagctgaataccaagagcactgaaataaccatcactggccacaatagatagctgagccattgtagccagtccggcacgtagctcattaactgtggcacccaaacgctaattcgattaaacagccaccaaaaagcgccgcccatcagtaaaatgttgaccaatagtggcaaaataacgaagcgtctaatacctgggcgaataattaaccgccaaccttccacaaaatagtgaaagccgctggtggtttttgtgtctttttgcacgagtgacatgccttccatttctctgtaactgaatcgtccagcctatcatattgctatcaattttctctgcctagtgccatattggttaataaacgaacgaaatagctagcataatcatctttcttaacagaaaatcgagcacggacttgcacttgtgaacgttgagaaatagagttaaagggtgaatgtttgccgcggtggcaatgtattggaacaacagagatagtaatgatgcaggatttgcgtctgatattaatcgttgttggcgcgatcgccataatagcgttgttattgcatggtttatggaccagccgtaaagaacgctcttccctatttcgcgatcgcccagttaaacgtccgaaacaagaacgtgatgaaaccccgatcgagaccttcgatgaaggggttggagaagtgcgggtacggacttctcatccacaggataagccttcgttaagtcacgttgatgacaacgatgaggtgcctatcattcaacatactgagcctaaaccggcttcggtaaacgtagcgtctcgtcaagcgccggtagcccccgtgcagccagagtatgacgatccgttgctgggcggattctcgcctgaacaaccaccgcatgccacatcgggtgatccgctgttggggtcggcgactgaatcctattcagccccggaaccagcgccagaaccacagcacgttgagcctaagcaggctgaaccgcagcacgaacctgtagctgcatccgctccggaagtgaagcaagttgcgaaactgaaagaaacggtactggttctgcatgtttctgcccaccacggtggttctatcggcggcgaagtgctattgcaaagcgtattgcaggctggtttccagtttggcgaaatgggcattttccatcgtcatctcagcccggcaggcagtggcccagttctgttcagtttggcgaacatggtcaaaccgggatctttcgatcctgacaccatgtctgatttctcaacgcctggcgtctccatgtttatgatggtgccgtcttatggcgatgcgaatcaaaactttaagttgatgctgcaatcggctcagcgtattgccgatgacgtcggtggtgtggtgctggatgatgagcgtcgcatgatgacgccgcagaagctggagacctataaagcccgtatccgtgaagttctggatgcgactgccgaatagtaagcttagatagcgaaacgaattaacccgaacccccgcatgccgggggttttttatctttgatggtgggccatggaatcgataatccaacaacttaatcaactgcgagcctcactgcgccatcacgaacatcaatatcatgtgctggatgcgccagaaattcccgatgcagaatatgaccgtctgatgggcgaactgcgggagctggaagcgcaacaccccgaattgattaccgcagattctcctacccagcgtgtcggtgctgcacctctggatgcctttgatcaggtacgccacgaagtccctatgctgtctctggataacgtatttgatgaagaaagctatctggctttcaataaacgggttaatgaccggctgaaaatcgcagagccgctgaccttttgctgtgagctaaaattagacggtctggcggtcagtttgctgtatgaggacggcgagttagtccgcgctgctacccgtggtgatggtacgaccggtgagaatattaccgccaacgttcgcactattcgcgcgattcctttgcgtttgcacggtgacaatattccgcgtcgcgtggaagtccgtggcgaagtctttatgccgcaggcgggttttgaacaactgaacgaagaggcgcgacgtaaaggtggcaaaatttttgccaatccgcgtaacgccgccgctggctctttacggcagctcgatccgcgaattacggccaaacggccattaacctttttctgttatggcgtcggtttgatggacggcggcgaactgccccgtagccatttttcacgcttgcagcagtttaaagcctggggtttgccggtcagcgatcgcgtcaaactttgtaccggggctgaacaggttattgatttttatcatcaggttgagcaagatcgtgccactctggggtttgatatcgatggcgtagtgatcaaggttgactcgctggatttacaggaacaactgggctttgttgccagagcgccacgctgggcaaccgcgtttaaattcccggcgcaggaacaagttactcaggtccgcgaagtggagtttcaggttggccgcaccggtgctatcacgccggtagctcgtctggagccggtgcaggtggcgggggtgattgttagcaatgcgaccttgcataatgcagatgaaattgagcgtctgggtctgcgtattggcgataccgttattgtgcgtcgcgccggtgatgttattccgcaggtagtcggcgtggtgctggatgaacggccagccaatgcgcgggaagtgatattccccgatcgttgcccggtatgtggctctgatgtcgaacgcgttgaaggtgaagccgtggcgcgttgcaccggcggtttgttctgcgccgcgcagcgtaaagaagcgctgaagcacttcgtttctcgtcgcgcgttagacgtagacggtatgggcgataaaattatcgaacaattggtggagaaagaatatgtcaccaatccagccgatttgtttacgctgacggccggaaaactgaccggtttggatcgtatggggccaaaatcggcacagaatctggtcgccgccttggaaaaagccaaggaaactacctttgcccgcttcctctatgcattagggattcgtgaggttggtgaagcaactgctgccaatctggccgcgcacttccgcacgttggataatctgcgttcagcggatgttgaagcgctgaaagccgtaccggacgtgggtgaagtggtcgctaaacacgtgctgaatttcctatcggaagaacataaccagcaggttatctttcagcttgaacacgtggtgcgctggccggagccacagcggattattgcggaagagatcgacagtccttttgctggaaaaaccgtggtattgaccggctctctgaatattctttccagagatgaagccaaggatcgccttaccgcgttaggcgcgaaagttagcggcagcgtgtcgaagaaaaccgatttggtgatagccggtgaagccgcgggctcaaagctggcaaaagcgcaggaattgggcattaaggtgatcgatgaagccgagatgatccgtttgctgggcgaatcagaataaacctgaaacccgccgttgccgcggtgggtttggcctgaatggctgagaggtgtggagtagggtgtggaaaaagaaaacctgattgaaatagccaatacccgtatgccttttggcaaataccaagggcgagttttgatcgatttaccggaagaatacctattgtggtttgcccgtaaaggagagtttcctcagggtaaattgggcatgctgatggagctcacgatgacgatcaaaatggaagggctagaaggcctggttaaacctcttaaaaaagactgacataccatgatggcgacactatttttgcttcagtgctcgccatcattaattcatctatcttatccaacccattaagaaataaacgttaatctgactctgctccgtcgggcgattaatatcgtctccagccgttgggctgttgtcggggctgtctgattgctgcgtgttttccgcttctttagcctgaatccgggcgacttcggcctgcaatgtcttaattttatttggaatcagctgttgctgcttttacttttcatcggcgctgagatccgaatctttaatggtactgagcttttccgttaacgtccgaattagctaagttggcgcttttgcctgtgaggtattgcggttatcgctggaactggcgatggcagaggcggctgagatggtattcgacatttctattcttcaaaacagatagggaataaggcttattagggtttctgtctttaacggttgacgcggcttttacacaatcctttcactgactgaacgctggcttatcacacggtattattgggttatatttgataccagagaattgaacgtgcaaaagggcgggtagatgagcgcggggaaaatcccataaagctgcagagtccaaacgcaataaaaccagccataagctggtttacgcgtaaatgggtggaagcgggctaatacggcagccagtcgaattaagccttagacatagatattaatctgattgccagcgcgattttgcccatcgtcagcgccgacgcgggttttgttgacgctatctactgcggtcagggcgggtttgttactctgcgcatgggttgttttgatggcgagcagatcgtccttacccttttctgcctctttggcctgaattctggcaatttctgcatagagggctttgatctggttggaaatcaactgctgttgcttttgtatttcctctttcgataagccggagtcttttagctcggacaatttctccgtcagatcctgtatttgctggtgcagcgctttgatctgagattgggtgtcgctaccggtacctgaggtgctcgccttgttatgttgggctatttgcggtaacggggctgctgtagtaatagtattggacatccttttctcctaataatcatgtggggattaagaggtttatcggcataatcagctgattctttagtcagttgtcggatattcatatagcttgagactggccgctgtagaccaaacgcagtttaggccagaggcttagccaacctttatcggttactcgctgatgaaaggtcgccagatcgccgtttttatcattgaaagtaatcgttgaggtaaacaaagcctgtaaacccagaggcgcaatcaaagtgaggctatcatccgcttccagccgcactccgatagcggtttcgacctcgacccaatagctgattgcgtccgcggtgttcaaataagggggacggttgctgcgcaagtgcatacgcgcctgattttttaccgaccacggcagcggagattgcatcagaagctgcgcttctaactctttatcgcgctgtgggtgaatgttatcgcggtcaaagtagaccagatcgatatcattcagcgcagtgctgtcggcataatcctgcagccggtcccataccagattacgcacaaaaccggcagccaaacaccattggcttaatcctaattgacgggcatgacgtagggcttccatgcgttggctatcggactgtatccactcaataatttgctgttgctgaggcatagaaatccaaactgatttatctgatgaataagcgagaaatagcatgccagcccggaagggcgaataggtagcgaccggatcagttgttttttgaatagcagaaagcaaaagaccggccataggccggtcttttaaatggtggtggagctagacgggatcgaaccgtcgacctcttgcatgccatgcaagcgctctcccagctgagctatagccccacaaatgtggtgtagtactggaatttatactgaaaattatttgtaccgccaatcaaccttaattgcattcaatcaagcgaagtttggtggagctagacgggatcgaaccgtcgacctcttgcatgccatgcaagcgctctcccagctgagctatagccccaatgtacacataataaatcgtgtgaacggggcgcatgatatgaaaccgcagaaacagtgtcaacggctaattccatttctgtgtttaagcgctgaaaaagccgccaaatcagcataaaaagcacagaataatggatgacgtatcacagctttcacttttataaagatgaaaaaaagcggccaattcaggccgctgtgagactcgaaaaaacgaaagtcttactgttgcgcttcgcgttgagcgataaatgccagcgctttatcgatacgagatagcgaacgtgactgaccgatagcataaacggtgacgtccatgcctggggactgacctgcaccagtcacggctacacgcagtggcataccgactttgcccatacctacgccgaggtcgtctgcggtgctctgaatcgcatgatgaacgttttcagctgtccaatcggtaatggcagccagtttagcgcgtaccgcttccaatggctgacgagcaactggacgcaggtgttttttagccgcatctgcgtcaaactcgtcaaactcttcatagaaatagcggcaggattcggccatttctttcagtgtcttgcagcgttcgcccagcaatttaacgatttcaaccaactcagggccgttgcgggtatcaaaaccttgctgttcgatatgccaagccagatggactgccacctgctccggcggcagagtattaatgtaatgatggttcagccactgtagtttttccgtattgaaggcgctggcggacttactgatggcatccagagtgaagagttctttcatttcttcaacggagaaaatttcctgatcgccatgagaccagcccaagcgaaccagatagttcagcaaggcttctggcagatagccatcatcgcggtactgcataacgcccaccgcgccgtggcgtttggacagttttttaccgtcgtcgcccagaatcatggaaacgtgagcataaactggaaccggagcgcccagcgctttcagaatgttgatctggcgtggtgtattgttgatatggtcttcacctcggataacgtgggtgatttccatatcccagtcatcaataacaacgcagaagttataggtcggagaaccatcggtacggcgaatgattagatcatccagttcctggttgctgaattcgattggcccgcggattttgtcatcaaagataacggaaccttcctgcgggttacggaaacgcaccacgcatggctcatcggcgctgtgggtgcaatggctgtcgcggcagtggccgtcgtagcgaggtttttcgccgttagccatttgggtttcacgcagttcgtccagacgctctctggagcagtagcagcggtaggcggtgccgttttccagcatttgatcgattaccgcgttgtagcggtcaaaacgtttagtctggaagtatgggccttcatcccaatccaggttcaaccagttcatcccgtccataatggcgtcaatggcttcctgagtagagcgctccagatcggtgtcttctatacgcaatacaaattcaccacctaaatgacgagtgaataaccaggaatacaaggcggtacgtgcgccacctacgtggaggtagccggtaggactgggtgcaaaacgggttttgattttcattgggatcaagtgccttattacgctacgcctgtcggcagaggccgacgattgctcggaatttgaaaaaagtaggccacattctatcactctgccccaattcctcaacgccgttccggagtagactgatagtattcgtggtgtttatggctaaagaaacgtcaacgttggtgataaatatcgcatcctgtttaaaattgcggcgaacgattgttttcgttctaaaaagcgttgactcacttcgaactatccctataatgcgactccaacaacacggcggggcgattagctcagttggtagagcatctcctttacacggagggggtcatcagttcgaatctggtatcgcccaccaaactcgacgtgttagcagtaagaaatagaatgagatagatgagggcgattagctcagttggtagagcatctcctttacacggagggggtcatcagttcgaatctggtatcgcccaccactcatcactcattgagttgttcagcagtaccgttgtaagtaagaagtgggcgattagctcagttggtagagcatctcctttacacggagggggtcatcagttcgaatctggtatcgcccaccacttcttaagacttcgggtcgttagctcagttggtagagcagttgacttttaatcaattggtcgcaggttcgaatcccgcacgacccaccatctccttctcgcatcagtaaactccccaaaaaaataacatactgcacgattcgtgtgggtgagacctgcgttcaggctcgagccaagcaaagcacgcaccattcctatttccattttatctccgtcaaatttccctaaaaccgcggttttcagccataacgcttttgcctaggttcacttattgcgcttcgtatcctctaaatagcttgctgaaaaaacctcgcttatacgggtaaatagattatttcatgcgtataaagccagcagagaggctgacacagcgtaggttaacgaggagtacggaaataagccgagctttctcataaggcgcagggagcagtaagggcgcttaattcaatttaggggaagtgctgtggcgtaggatgttacggctgctgggcggctgataagatggctgggaaaaacggcgtgacatgttactgatgactgaaagattgaagaaactgtgggcataaaaaaaggcgctgcagcgcctttttcatcaaccgacttagattaaagcaccagaccagcaatagaggcggacagcacgctaaccagcgttgagccgtacagcagtttcaagccgaagcgtgaaaccacgttgccctgatgctcattcagccctttaatcgcaccggcaacaataccgatggatgaaaagttagcgaaagaaaccaggaatacggacaggataccgacgctgcgcggagacagttcggaagccactttttgtaagtccatcatggcaacaaattcgttagaaaccaatttggttgccatgatactaccgacctgcagcgcttcatgagttgggacgcccataacccaggcaaacgggaagaagacgtaacccagaataccctggaagctaataccaaatgcgaaggtgaacagggcgttaactgcagcgatcagcgcgataaaaccaatcagcatagcggcaacgataatcgcaaccttgaaaccggccaggatgtattcacccagcatttcaaagaagctttggccttcatgcagcgtacccagttgtagctcttcttcttcgcccactttgtatgggttaatcagtgacagcacgataaaggtactgaacatgttgagtaccagcgcggcgacaacaaatttagcatccagcatcgacatataagcaccaacgatcgacatggaaaccgtcgacatcgcagtggcagccatggtgtacatgcgtttttcagacatcttgcctaaaatgtctttataggcgataaagttttctgattgaccaaggatcagcgagctgacggcgttgaaagattccagcttacccatgccgttcactttagaaagcagggtaccgatcagacgaataaccacaggcaacactttgatatgttgcaaaataccgatcaacgcggaaatgaagacgatagggcaaagcactctcaggaagaagaaggccagacctttgtcacccatattgccgaaaacaaaatcggtaccggtcgcggcgaatccgagtaatttgtcgaagaaggcggcgaatcctttcacaaaacccaggcccacttccgaatgaaggaagaagtatgccaatagcacttcaataaccaataactgaatgacaaaccgaatgcggatgctcttgcggtctttacaaattagcagagccaaaatggctacgacgaccaaggccaacgcaaactgcagaatatgggacatgtgtgctccaaacttgaggcaggctagatttcggaggtcattttatgtaacgccaacattaaaaacgagacattgattgcaaatataaaaagtcacctgagtatttgcaattaaattaataggtttcgtcacaaaacgacgcatgttaaaaattttctttatttgtagcgtgatggtgctaatttgttgagagttcttgcgcaaaaagccgcagggtttagtgaatacaagcacagatttccagaaagtaaaacccggctattgaaacagcgatcttggcgggtggttattcagaaagattggctatcagagagataagttttaccaatgcaaatgcgcttgataattattatcatttagataatatgagatagacataatatctctaagggcaaaattgatatgatgaatagccgcgctaccgcttcagagggtcgtacatcaaggaaggtgaagctttccttgatggggccagcatttatcgcggctatcggttacatcgatcccggtaattttgctaccaatattcaggccggagcctcattcggttacaccctgctttgggtcgtggtgtgggccaatctgatggcaatgctgatccaactcctctccgcaaaactcggaattgctaccggtaaaaatttggcggaacatattcgagatcgttttccgcgtcctgctgtctgggcttattgggttcaggcagaaattatcgctatggcaacagatttagccgaatttattggggcggctataggatttaaattattgctcggggtgacgttattagaaggcgccatactcaccggtattgccactttcctcattctgatgctacaaaatcgcggacaaaaacccttggagctggtcattggtggcctgctggtgtttgtcgccgctgcttatattgtcgaactgatcttttcccaacctgaagttagcgccttgacgaagggaatgctgattcccaatttaccaaacggcgatgccgtatttttagccgctggagtcctgggggcgacgattatgccacacgttatttatcttcattcctccctgacgcaaaccggtggaaaggaatcaaaagccgatcgttatgcctcgaccaaactagacgtagccaccgccatgacgatcgcaggcttcgtgaatttagccatgatggcaacggcggcagccgcttttcattttaacggttatggcagtatcgccgaaattgaacaggcttatctcacgctgcaacctttattgggtcacggggcggcgacaatcttcggtctgagtctggttgccgccgggttgtcgtctaccgtggtaggcacgttggcgggacaggtagtgatgcaaggcttcgtccgtttctatattccgatttggatacgccgctgtatcactatgttgccatcatttgtggtgattatgatgggaatggatgcaacccgaatattggtgatgagccaggttttgctgagttttggcattgcgttggcgctagtgcctctgctgtcctttactggcaatcgggaattaatgggagaaatggttaattcccgtttggttcagaacattgggaaactgatcgtcgtggttgtggtggggctaaatctatatttactcattagtctggcttaataaaattcggataaccggcggattgttagtgaataccgccggtattgtttttaatcatcgtggtcgtgatgatggtggcgaccatgatgtttattctgttgttttttgtactttttatacgcgtgcttatcgtatttccaataacgcccatcgtggtaatagtagtttttcttccaccagtccttatctcgccagcgatggccgtcccagtaatggccgcgtcgactgcgttcacctacatcctgcccctgatgcccttgccaccattgacgatcgcgccagtcataaccatcccagtagttcccatttctatcctgttcgccgatctgtaaagagacgccaggaaggagattgatactgacggcctgcgcctgctgtgccaaaggtaatgtagccagcacgacaatcagcaataggggttttaacacgataatttccttctttatctgtcggttgtgataaaaactgagccgacagcgagtcacgcaatattaagatattaataaaataaatagaatctagcgttcagataaaactggaaaacaatgctttaggaattatctgcctgttcatcataaagatgaaggagggcggataattcgccctctggtgatgtgtaaagtgggaaagcgattacagcaggatggattctatacgcgctatctcctcaacactaaagtgagtattagtcagggcagttaccgcatcctcaatttgtgccgttttactggcgccaatcagcgcggaggtcactttgccctcacgcagcacccaagccaccgccatttgcgataacttttgcccgcgatccgctgctagatcgttgagttggcgtacttttgccagtttttcctcggtaatttgcgctggattaaggaatttactgccgctggcagcacgggaatcctgaggaatgccgttgagatagcgatctgtcagcagcccgcccgccagcggtgaaaaggcgatggagccgacgccaaattctgtcaggacatcctgcaaaccgtcctcgatccagcgttcgaacatagaatattttggctgatgaatcaggcaaggcgtaccaagggcttgcagaatagtcaaagcctgctgcgcctgttctgcggggtagttggatagcccgatatacagcgccttaccctgtcgtaccagcaaatccagcgctttcattgtctcctctaaaggcgtctgcggatcgggtcgatggtggtagaaaatatccacatagtctaatcccatgcgccgcaagctctgattcaggctggccaccagatacttcttcgaaccccagtcgccataagggccgggccacatggtgtaacccgctttagaggagataatcagctcatcacgataaggctgcagatcttgctgcaagattcggccaaaattctcttcggctgaacctggcggcggcccgtaattattcgccaaatcgaaatgggtaatcccatgatcgaaggcacagtgaatcagatttcggctgttttcaaacagtgttgcatcgccgaagttatgccataagccgagagaaatagccgatagttttaaaccgctgtgaccacagcgccgatactccatgtcttgatagcggatagggttagcttggtaaaccatgacaatccttaagaggaatagggcagataaatgagtgtaagccttttcactcattcggttcgccagcgggatcacaaggcccataaagtcacgaaatatttacagtgcaggattgctattaattctaacgcattagataaatttaattattagctaatactttgcttatgaactttttatatgttggtttttttcctaaggatcacgcgcgctatgaaaagtagtgtttataaagttgccgattatttgctggatcgcttggcgcaaattggaatcaaacacctgtttggcgtgccgggggattacaatctccagtttttggatcatgtcatcgctcacccgcagattgactgggtgggatgtgcgaacgaactcaatgcggcctatgctgcagatggttatgcgcgtactcagcctgctgccgcgttgctcaccaccatgggcgtgggcgaattaagcgctatcaacggcattgcggggagttttgccgaattcttgccggtgatccacatcgtcgggatgccggcacagcactcccagcaaaagaaagagctgatacaccactctctcggtgatggtgattttagccacttttcgactatggctgaaatggttagctgcgctcaggccaatctcacgttgaccaacgctgccagcgaaatagatagagtagtggcagctgcgcttgctcaacgcaaaccggtttatttacaacttccttccgatgtggcagagatgccgatcgacgccaaacccaattcgctggcgtttcaacaagcgccgtactcatctcagtcattgcgggattttatcgacgcggcgagagagtcacttgcttcagctcgccatgtggctgtattggcagattttttagtggatcgctttggcgctacccagcaattaagaaattggctaagccaaactcatttaccctatgcgacattactgatggggaaaggtattgtagatgaatctcgcgcagagtttattggtacttacagcgcagcacccagtgatgagcggattagattaacgattgaaggagcggatgtagttattaccgttggcgtatggtttgtcgacaccataaccgccggatttagtcagcaaatttgtacggaaagacgcattgatatctgccctttcgaagccaaagtgggttcgcgtgtatttagccaaatcccgatgactatagccattgatgcgctggcaaaactgagcctggaattacagcatgaatggatacagcccgatgtttaccattgcccgttgccgccttctttagcacaacatctggatcagcaaacattttggtatcacattcagacgtttttgcggccctttgatattgtgctggccgatcagggtacggcttgctttggtgccgcagctctgagattgcccaaggatgcgatatttattacccaatcgctgtggggctccatcggatttagcttgccggcggcctatggcgtgcaaaccggcaatccgcagcgtcgagtcattttactgattggggacggtgccgctcagttaagcattcaggaactgggatcaatgctgcgggatgggttaaaacccattattctcttgttgaataacaatggctacaccgtagaaagagctattcacggcgaaaatcaaccctataacgatatatctacatggaattggactcagttaccgcaggcgtttggggcgggtagcgaagtcatatccctgaaagtgagtgagccagagcaattacataaagcattgcaattggctgatcaaaactcgcagctagtatttatcgaagttgttctaccgcagatggatatatcaccactgctgaggaaagttacggaatctctgcgaaacagaaacgcctcaacttgatatccgtggtgattggctgcccgtaagctgttctaacagccagaaaccggctggtcccggcgggttttttttcgaccataccgcatccagagaaatcatttttggccaaccaaccgcagagagctcaaccaattgattacggctgaattgtttcaccatccaacgtggcaggattgcccagccaaagccctgctccgccatttctaacagcattaaatagcttggcgctgaccaaaccggcccttgagccgtatttttatctgtttgcgcataggtgttcagacgcagttgccgcacggtggccagttgttcaggttggatttgttggcactgagctagcggatgattctgttggacaaacagcgccatacaggactgttctggcagaaggctgacgccaatatctggcgggtaatctttttggacttcaaccatacccaaatgagcgcgaccatcttgcagtaacccaataacatcatcggcctcagcaatcatgcattcgaattcaatatcaggatagcgctgctcaaaacgttgcattagagcttcgtggtgagtgggttgatatatatctgagagtacaaaactaagacgaggctctactttatccgccaagcgaatagaaagatgatccaaacgctcgctggcagccaaaatttcctgaacctgcgccagaacgcgacgcccgtgagccgtgagcaccggctggcgtgcttgccgatcgaacaagactaaccccaaatctgcttccaaattggcaattgcagtgctgatggtggactgacttttacgcagtttacgagcggcagcagaaaaagatccctgagatgcggcttcgacgaatgcaattaacgcttccggtgaatagtgcattatctatctacttaatcgatggcttctatttttaatctatcccaaaaagcgatgataatcactcggtagtttttaattcatcaaaaaaacaggtcgattttatgcaagctaatcgtaaatcattcgttgaacgtattattcacgccgtggggttcgaagttatcgccgtcggcatttgtgcgccgctgggcgcttggttattaaaccgttcggttctgcaaatcgggacattagcggtaatgctatcgacggtcgccatgctgtggaacatcatctataacagtatctttgaccgaatctggcctgtgagccgcgtagcaaagacgctggcggtgcgtatctggcacgcttttggttttgaggccgggtttgtattgatcggcgtgcctattgcggcctggctgctggggatttcctggggacaggcttttatgctggagatcggcttcttcctgtttttcctaccttacaccatggcatataactggctttacgacacgctgagagcgcgagtgattgcttctcgtcatcaggcaaaagaaaaaacggctgcgtgtcagagtaacggtcaggattaaggggcgtaaaatgcgggaagcaaatgcgaaattatgcggtgtttctccatgctgaaacgtttttttgtgatccgtatcgctaaagacgcggtgtttagcccgtggtgattgttgtttttctgccgtgattttacagtaggtgcagttaactcaattagttaaatatccatttaacggagaagtatttgatgacgacctatgctttggtgggtgatgttggcgggactaatgcccgtttggcgctgtgcgctgtagcaacgggcgaaatatctcaggcgaaaacctattcagggcttgaatttgacagtctcgaagaagttatccgccagtatctggcggagcataatgttgcggtagaagacgcctgtcttgccattgcttgcccgattaccggtgattgggtggccatgacaaatcatacctgggcgttttccattgccgaaatgcaaagaaatcttgatctgagtaagctggaaattatcaatgattttactgcggtatcaatggcgatacctatgctttcaccgcaggatgttatccagttcggtggcaaagataagcagccgggcaaaccggtagcggtatacggcgcgggaacaggcttaggtgtggctcatttggttcatgtcgatcgccgttggttgagcctgccgggagaaggcggccatgtggattttgcgccaaacagcgaagaagaagattgcattttggcggtattgcggaaggaattagggcatgtttccgttgaacgcgtgctttccgggccgggtttggtgaatttatatcgcggaatcgtgatttctgaccatcgtgtgccggaaaatctggctccgaaggatgtcaccgaacgagcgctggcagatagctgtaccgattgtcgccgggcgctgtcgctattttgcgtgattatgggacgttttggcggcaatctggcgctgaatctcagcacctttggcggcgtttatattgccggaggcatagttccacgttttatggagttctttaaagcgtcgggattccgcggagcgtttgaagataaggggcgctttaaagattttctcgtcgatataccggtttatatgatcacccatcaacagccgggcttgctaggcgccggtgcctatttgcgccagacattaggtatggaactgtagttacattaacaaacgcctattatttgaaaggttaataaggcgttttttttaaagttctgtttagccatattttggataatgacggtaactgtaaaattttttgcagctgccggtctagttgctggcattaataacaggaactttatccatgacaataagtaacataaataccagcagcccctcccctctaatgaatctcccgacaaaaaataacttatataaaaggatagaaacgttaggtcaggaagtgaagaaaattaaaaatgagttgtctactattaaagtgcagattaatgaggggaaaagggcgattaggagtaacaatatcctgctaaaaagcctcacgggtatttcaaacaagcatggcgatgatgtgaatgtgcgcttgaaaaacggcagtgtaaagttcggccaaggtagcaattttttgaaaaactttgtttctggtagccgttatcaagctgagcgacaagaagccgctaaatattttggcgcggagggatgcgaagtctctgctgctgatggtatctctaagcttaaccaaaaaattaatattataaaaagtgcgctgcttgggctggaagagaataaaggattacaggaggccaaacttgaaggagtcaatgataagaagcatcgggtagatcaacaattacaacaaattgttgcggctgaggctaaggtaagaaaagccgatgaagctaatcaaaaaatccgtaatgacttttctatggtttatcaaagtaatgcaggctgtaaggctttaaatgttgaggctcgctaccagttcggccaagggcgctcgcccggtagtctaagcggtagtaaagtcattgccgagtatgaaagagtgcatggtgataatatcttcggccgaggcaacaaaaatcttaaaactacactcaaatttaattgttcggatttggctcaattagtcaaaactggagccaaagcgtggtatacgccaactagcaaaaatattattacgcatcgtggacaaggaataaccagcgcagggattaataaattaattagccaattcaatagcgataaaactcaaaatcaaaccactacttattcactagggcagttcttttctacctccggtgataaaaaggtcgcacaagattttgccaaccgtagccaggatagtgaaagagtgatgtttgaagttaagggcaacagtggtaggggcatttttgtatccggtggtttagcattcgagaataacgagcacgaagtattgtattcgccattagcaaatttcaaagtgacgtctattacgcaaaataatatgggtacttatcacgttaaacttagcgaagttgagcaaaataaaaaagcgagattattaccttactaagtttgtcactgatcaacgctctgattctgataaacccaaatgcctaccaactcttaggcttttcgccaagtattggtaggcattgatttggtctcacttaattcttatcaacctatcaacctattaagcatggctgctggcggtaatacccgtcggttcttcttttggctcttccatctgttttgccgaacctttcggtggtttgataatgagagttaacagtagggaaagcactgacatcacggcaatcacgataaaggtggcgtggaatccacccagacgggcggcgataaatgaacccgccagcgcccctaaaccaaagccttggtagataatgccatagtttttactgtggtttttcagtccgaagaagtcaccgacaatggccgggaatacggtgatattgccgccgaaacagaaggcaatggcacctacgcacaggaagaagagggcgtgagtcaaaggaacgaagcttagaacgcaaactgccagcgtagtgactaacaaagtgaaggtaatcactcgcatacgcccgactttatcagacagcgcgcccagaataatgcggccagcggtgttgaaaatagcgatggcagatacggtattagccgcggtggctaaatccattcccgctaattcgacgcccaaatccttcacgataccaatcagatacaatccactcatacatgcggtgaagaagatgatgaacaggaaataagattctttcactgccagcatttcttttacgctgaaatcacggccattctggctggcttgctgcatattggttggttgtggagcgctgactttttctttcagcaacagggagcctacgccgaccagagccatcacgataagaccccagtagaagaaggccagagagacgccctgattggcaatcaggctggcattgacgtatttgaatagcaggctaccggtaccgaatgcgccaacggaaataccggctatcaggcccttacgctcagggaaccatttaattagattagaaagtgttgtgatatatgcggtgccatcggcaaaaccgacgacgacaccagccagaagataaatcatgccaagggaagtggcgaaggagctggctatcagccccaaacccagaatcaggccggatatcaaagtcagattgcgaatgccgaaacgttcctgcaagcgacctgcaaatagcgtggcaatagccaaagagaaactggtgattgaaaaggtggtggcaactgcgccgagtgaccaactgaatttttcacccagcggctggttgaataggctccatgtataaatagtgcccaaacccatttggacaatgatagtacctacaacgattagccaacgatttaccggtttgctgctcatgccggactccttaacatcaatacaacctggcccgaataattcggtctgccataaaattacgagctgatgattgacgaaggatttggatgttaagtcactatcagcccgcccaatgaagccagtatacgggcgggtttaccatgaaagatcaaatgaggaatgagctgcattcagcacggaatgaaatgcatctataggcgcatcaactgcctgaactcttttaccttgctgcggctgacgggcacttcaaaatccaaatcactgagacgcaggatgtaagtattgttaaaccagggcacgatttcgcgaattttggacaggttaacgcagtaagaacggtggcagcggaagaagtactcctctggcagtcggctgaagaattcagtgatattcatcggcatgatgaactcttcccggcgggtgtaaaccagagtcactttttcctgcgctgcggcgtaataaatatcgttgatatccgtcactatgatgcgttcgtctttcatcagattgatggtatgagcgctgcgcggtgccagaccggtgggttgctcgttttcctgacggttacgcttatgcagcgcttccagtttttgcagcatggtgacaattcgggattcgtgatatggcttgagaatataatcaaatgcttctatttcaaaagcttccaccgcgtgctctttataggcagtgataaagataatatgcggtttatgggtaaatttgctgatattttgtgccagcagcacgccatccaacgacggaatgtttatatccagaaaaatagcatcaacctgatgattttggagatattttaatacatctaatccgtcatcaaaggttgcttctatggtgataccactgtgctggcgaatgagatagctcagttcttcctgagcaagaaactcatcttccacaataatggctttcatgaatattgctccgggtagactggcggtgaagttgaattatgcatgaacttttccgccatttttgctgataaagaatgaaatctcggtgcctggctctaaacgtcgaatttgtaagcctgcaccgtataacaattgcacacggtgatgcacattcagtaggcctattttgttacctggcatttcattattggccaccctgtctatggtctcctgattaatgccattaccggtgtctttaactgaaattttaatttgatctccatgatctttcactgcaataacgaccacgcctttgcctttgcaaggctgaattccatgcacaatggcgttttccaccagaggttgaattaacaggctgggaattcgcagtgaaatatcatcgtcgatatcataaataaccgtcagtttgctgccgaaacgagcctgttcaatagcaatataatcctgtatctgatgtagctctttgcgaatatctatctgttcgtcattcagttcgaggttataacgcaaataacgagacagattgatgatcaactgtcgagcggtatctggattgatccgaatcgaggaggagatagcattcagcgcattaaacaggaagtgaggattgattttactttgcaatgcgcgcatttctgctttatttgccatttccttcagctgttcaatacgtgagacttccatttgcgtagagataatttgcgataggccgaccgccatcactttcagtgaataggtaattttatgagcatggcagtaataaatttttagcgatccggttacttcacctttttcccacagagggatgataatcagcgaatgaatttgcggcgtacggtgaacctcatcgttattacgaatagtaattttgccacgctgaatgctctccttagtgatatcgctaataatttcgtgtccaatatcataggtctcggcaccgacgccaacgtaggccagaatattgtgagtattggtaatggctaccgcatctgcttttatatcggtgcggataatttcacacacggtgctcagtgattccccgttgatatttcggaagtagggcagcgttttattggcgatatccaaagccagtttcgcctgccgagcggcaatcacctctttttcatcctcaacgctttgtaccagcaacacaatcaggccgatacacactgcgcctaaaatcatcggaatcgcgattttcgatacaatatcgatacccagcgccgtcggtttggcccatgccacaaccaaaagcatagtgagcgattcgcagatcatgccgccgagaataccaatgctccattggcgttcttttttcaccttcaaattgatataaccagacatcaacccggcaataatgctggtgataagacagggaacagaagtaatgccatcgatatcaattaaatagcgatggctaccggcaataataccggtgatgatgccgacccaggggccaaatagaataccgccagacattacggcaataacccgaacgttaactagcgatccttcgacgttaatacctgagtaggtaccaaagatggcgaacagagagaaaatagcggttaccgcgagcagttccagcggcgtgtgtttctctttttgtagtagctgacggaacaggcgggtgcgggtcaggaaaaacaggcagatcaacattagcgcggcgcgatcaaaaaccgccagcaacatttcaaatatttggtgcacaacaggctcgtttgcgggtgaatatcggctcactataaggaaaaacggcttttatcgctactttaaccgtgttttttaccgcagcagaactgaagcaattcagtcggaaaaacgagtcttccgactgatcattatctggcgggaggattactgttcgaagcagagctgttgttttcctaatggcgtcaaatcttcaaccgtggctctgccgatgaaatcgacttcaaaatcatcagcggcgaaatccggtggcgatttaccgtcgataaagctggccagttgacgcggtaaataagtggcatttttctcacaccagggagccgcagcgatatacatcacattactgtcaaattcaccgttgtgttcattttccactgagtgaataacgtcgcaatgccagaacaccgtatcaccagcctctagatcgggaataggggaaatggcttcgagtaaaagaggatgccattgttccgatgctgaaagcgctcgacccggcattgcaccgcataagtcatcttctgcgacatcatcttgtaacgcgcgcagcagaatgtaggccatggcgttggcaatcgggatgacattcagcgtgcctgcatgggttcgctgcggggttaacgccgtccacccctgaaaggttcggaacatagagcacactgccggcgatggaagctcacgtacttccggtctgccttctgcggcgaaaggatcatatttttgccattcgccggaaaatacgtggcggtaaacgtggcggaaattttcatccagccagcgctcaatggagccgccgtcaacgtgaggcgataagcccagtgaagatgaatgcggcggccggcggcgggtgcggtcggcgtaagtgactacgcggtcaggatcaaagtgatgtttgccgttactttcgctgtgccataggttattgagaaacacctgaaccgcctgcatccgatgatcctgtcgggcttccacctgaggtttggaccaatagatcccataaatctgcggcttattggccgctaaagtgccgaaataattgtcttcggcggcgtttttcaaacgctcaacaaagttgtttcgctctaaatactggccgatttcccgattccaattctcggctttttctcgtgggaatacgccgtgaatggcgcaggttccccgctgttttatcagttttttttgttgctcggtcacgcggttatggatgatatcgtcagcgtgtaagcgcggcaccgggttttcgcccgcagctaaactttgacgaatagtgtttacctgttgacgaatgttttcctcaacggcgagaaaaacttgctgataatcaggtaaatcctggcgtagctgacgtttgactagcttgattgccgctggaatatcatctatttgtaatgaagacatattttatctctccgacgtactgagacaggggaaacggggcaataggtaaatctgggaaaaataaagccaccgagatgttctacatttgttaaattcatgtggctattatttcggcaaaatagagaagaataaagggatgatgttaggaaaaaatctcccctttattttgtgatttatcccgaccaaacagttgagaaaataatgattcatatcgctaccgaacgattaacgttgagcacgatgacagaacaggattggccacttttttcacggctatatcaggacccggaggtgattcgctatatttccgatccgcaggatctcgtcaccattcagacgcgttttgctgttcgcgtgcagccttgggacaggacttcagaccattggctgtgtttggttattcgcgaaaaagcatcggggcaacctgttggtatcacgggatttttaccggaatggcagccttttcagcaagcggaggtcggctatggcttattacctgaatttaccggcaaaggttatggtcaggaatcgctggtggcggtgctggaatttgcttttcagcaatgtcagtttcataaagtgaaagcgacggtaacggtaggtaatcagccttcccgcgccttgctggagcgctgtggttttcaactggaaggaaccttaagagacaatttcagcctcagtgggaaatggtgcgatgactgggtactgggattgctggccgatgagtttgctgcgagaaaaaatgcgttgttactttgaggtaaaataatttcgttagcctctcgacagtatttcagcgctgcgatatgttcttaaaagacccgtgatggtctgcgtcgctcggacggtccgggcgctaacgtatcctcgaggaaattatggctgaattaccatccaaacgtcgttttacccgcattgatcgcctcccaccctatgtttttaatattacttctgagctaaagatggctgcgcgccgccgtggcgaagacattattgatttcagtatgggtaatccggatgggccaacgccgccgcatattgtagaaaaatgtgtagcgttgctcaacgtgaagatactcacggctattccacttcgcgcggtattccgcgtttgcgtcgcgccatttctcgttggtacgccgatcgttatcaggttgatatcgatccggaaagtgaagctatcgtgaccattggttctaaagaagggttggcgcatttgatgctggcaacgttggatcacggtgataccgttttggtaccgaatccaagctatcccattcatatttatggcgcagtgattgcgggcgcgcaggtgcgctcagttccactgacagagggtattgatttcttcggtgaattagaaagggcgattcgtgaaaccattcctaagcctaaaatgatgattttaggcttcccatcaaatcccacggcacagtgcgtcgaactggacttttttgagcgagtggttgggttagccaaacagtatgatgtgctggtggtgcatgacttagcctatgcagatattgtttatgacggctggaaggccccttcgatcatgcaagtaccgggtgcaaaagacattgcggtagaatttttcaccctatcgaaaagctataacatggccggttggcgtattggctttatggtcggaaatcccgaattggtcagtgcgctggcgcgaatcaaaagttaccacgattacggtacttttactccgttgcaggtagctgccattgctgccctggaaggggatcagcagtgtgtgaaggacattgccgaacagtaccgtcagcgccgtaatgcattggtaaaaggcctgcatgaagctggctggatggtagaaaatccgaaagcgtcaatgtacgtttgggcgaaaattcctgagccttatgcgcatctaggttcgcttgagtttgccaagcgcttgttgtcggaagcgaaagtctgcgtttctccgggaattggctttggtgattatggcgatacccacgtgcgtttcgcgctaatcgagaatcaggatcgcatccggcaggcggtacgcgggattaaaagtatgtttcgcgttgatggcttaattaaaccgactaaactggccaacggcgaataagattagccactcactagccgggctgattttattacccggttagtgtttcttgctgcaaatatagctttttcaataagctgaatgagcctcttaaggttagcttcatcaaaattgcgccatactcttagctaaatagtttttgacgtaagacttttgtggagcatcacaatgaagaatcgctattctctgtctcaaattactctgcactggctaacgctattaatggtgattttgacctattcagcgatattgctcagcgacgtcgttcctgatgaagatcggacgctagtaaagaatctgcactttaattttggccttagtgtctgggtattgatgttattgcggctttggctacgccaacgtaactcttctccggttgttactccgtcattaccaaagtggcaggctgttagcgcccatgcattacattggctgatatacctgatgtttttgtcgttaccgatattaggcgtgctggctcaggcctacggcggcaaaacctggtatttactgggctggcaagtgccacagtgggttatgcctaattctcaggccagatcgttaattaaacaggcccatgagcttattgctactctgggatattttgttatcggactgcatacgctggcggcgctatatcatcactatattcggcgtgatgacacgctacgtagaatgatgccgggaaaataaaatgacaaagggcgcggatgcgcccttatatgccgcaaaaggcggcggggttactctaccattaacatgaaggtgccaatccaaaccaccaacatgaaagagatacccataaagaaatatttcactgaacaactccccttggagctacctcgccagcaatgatccaacttgttgtgcagagtctgaaaagtagataagtatcgccccagcctagttgaagccgtatggttaccaagacagctcactcgctcggatctatctaaaatgccggtctgtcactttgactacggcaggatcgcgctaatgtaatcccataactagggagatatcaatactgtatttttatgcacccgatcacagttataggatttttacacaatttattaaggttatttatctgaaacgtgatggaaataacgattttttaaattttagataaataacaaattgttaccttctttcttttcaatcactctatagattcaatttttctgactaccacatgggcttcgtagcccagcaaatacaaagcctgctccagtgcctcgactttagatgcgtagtccacgtctaacaaacgctccatctgagcagcattcaggccaagtttccgcgctagatcggctttgcgagtgccgctggcgatcattccgttatgtaactcggcttttaatgtgaccaatatcggtaaatgtaccgaaaattcattgtcttctggcattgatggcgcgggaatagagcgtctttcttccatttccaccgcaatcgcggttttaagactatcttgagcttctagctctacatcctcaatagaataggtaacggactgtacttcaggaaaatcgcgaaaatgaatttgatattcgccgctggtttcatcaaaaaggtaactggctggataactgaacacggcgcgtactcctgtagagagaagtctatctaacatagagtagaaagacttctttcttacggtaatgggaaaaatgctatttagaattatatcttacaatcatcaaatatctcacataatgagatgagttcagatgtttttttgttaataaaaaagtctaatcgctcaccgggtttggctatcacagtatttgctttaccattatgcataaccccgccaaattgttgcctaaatcctacgttctctatatcgcgattattcgttatgtcagatattttacttaacgggatacggctattgcaaaatgcagagtcatttgacgaataaataatagtatcgtacttttcttgcaataaatttattctttgatcatcaagtgattcgttctcacatgtatcataatttatattttctactattttttttgaatttttgtcgtaagcaaagaatgtaacaccacgaagtataggtgtaggtaatttttcatattttataccggtttctcccgatgagctgaccgaaacaccaatgaattcgttattaaatataatggacttttgcggtttttcttctaacttaatggagccatcatagctaatgattttcttcttaatatttttatctgataggatatacagacatactttatttttaatgttattgactgcctcacattgagtcacatacataagtttactattttcttttaccgcatcgattacatcgagagcaaatgtattaaaataaacacttttaatgttatttttattatccagactagccaacattggcagtttgaatgagctgtttgatatattaatcacatttccatcagaggaaatactactatctatattaggataggcccacatatttgctgaatatgcaagaaatggatttatattattgttctcatcatgatattgattaatctcacttcgttctttttttaataggttccgaccaaaacctacatcagtgtttttttcaccagacacggcaaggatagttggccatacatctagcaatgtgccctggttagtgatttttcttccagagatatcttttttaattataataaaattatttcttctatcgctatcatgtctgttcaatatatggctaatatcattagccatcatgtaatgatctgaaaccaaaacaataatagttttgtcggcatactgggatgacataactctttttataaattggcttagtaaataatcagagcaagatactgcttttaacatgggttcagttatattttcagagattttcccatcacatacaggcaaaaattgccctgacggagcatgggtatttactgttaagaatgacaacatgaaattctgtttttcggctgagagcctttcaaactcattgtaagcatgttcaataagtatatcgtcatgaactccccagccattcatgagtgtttcgtctgcaagcccgttctctacgaaatattctttatcaaatatgttgttccaaccatgctgactcaggaatttatcgccacctgcgaattccttatcactcccgcgaataaactcattagtatatcctttgctttgaagatattcacctatgcagcttgctgagctaagaaactttgacattgatgaagcagaattaccttgaggcagtgtgaatgggatgccacattgagtatttactaaacccgccattgtccagccgctaccttcatgttgccggatatcggtgaaatctagcgattcattggctatttttgtaatctcaggtagataattaataccatcaaggtttctaaatgtatgttctaagctttcagcgtaaataaatacaaagttgtatttatttcttaattctgcattgggctttttataatatgatgtagcgaattcactatccccataattaaggttttttaatgaggatattacatttttcgcagatgtagagtttgtgataaagagtaatgttccaaaagcaaacgcgacatcaaataatttacgtcttgttatttttcttttctttgaaattattgcaaatgtaattatggctataggagtaaaagaaaataaaatagcaaaggcaatgtttgactttatatcatttaaagatgttccttttacaccgctaagcaaatggtaataaacggagtcagttacaccgttgccagtaaatcggtcacaaacaaaccagaatccgaatattattacacataacgaaagtgctatagctttcgttacgatgaaattctgagatttgaacattaaaattagtaatgtagataataagatataatccatgttgcccactaatatattaaaaagtcatatagtaatatttttatataattttttattttaattaattaataataattaggcaacaattaagttgtcattgttgaagttattctgatcacgacaattagaatcttgaaattaatgcctttaaaaagttatatttatcaatgtgataagcaggatttgtttgtggtgggcagcttgagatgagattttatggctgatgctgaatgaatgaaataaagaaatggtggcccgattttacaggttgttctctatccgaaaaattgctgctctctaagatacggggatatattgcaattgcatgattattatggtttttttgttttttaaggcaggttgttttcccccttcggtcaggttggttttctgtatcggtaactcaatttctatatttatttttaagcctaccggggggaatataactcagagcacggctttggagcgttcgcgcccttgggtacaggatagcgtggtgatatcgctatgtttaccagcatgatagatatttcctgctggaaaaatggctgctacaaatatgatttttaatccctttccccatagcactagagcaattgcgtagaatctgtatgcattcttcaccgttccaatcgtgcagaatatatttcagcaaatagaagccatggcctgatggaatagactcaaagaaatttccagcgccaatcgtgcattgggaagccatatttttgtgtctgatgattttcgcgattttctcagctacagaaggactataaaaaataaccccgacgggattcatgttagttgccaggatggttaacattaatgctccattgccgtctccgctatctataattctattgtaatcgttaaaattatagactggagttactttctgaacgaaatgttgggtcaggtcagccatatcattattaaatttatctgcctgctcgggatacaggtcgtagtgttaccatatatctaattgataatgtggttccaggttacttttctctcggttataccttattgaaacgaagagaaaacaaaggataattctcccatcattgccagcagaaaaggtttaatgttgccaatagtatttttatctaaatccgccgctgggataaattaaaaaattttctcgctcatcatattcccgttaacttcccagaaaatgcctccggcagccagcagccttaatcatcgatatgaatattctgatttcactccggttattttgccggttcgacaacgcttttaggatattaaaagagtcattctgcaacatttagtttggccgtaacctgagcacgtgggctaattgataaccatatacgatttcccaaacctgtttggatgactcgggagaaaatcttggtttcagcataatattttggtcgcagcaagagataacacaagtatagttaatgaatagagagcgcttctgtgggcgctgctcagaatttagttctttcaacggaatattttgatcttcacgttagcccgcatcttggcagttatgttcatattttgtggcttagtcaggtttatctgaagctgataacataatttcattcatgattggctgatacccatatgattcctgtttgttcgcggcgaacaatgtcttaccatagcgatcactttttcttatatgactgtgtggataaccgatgcgttattgggctgctattttacctatgcttactttgctgaccgcctgtagcaatcaaccgacacctttagccacggcatctcagaagggaggttttcttctggaaccagcgcatacaggtcatatgctaagtggtgatttcgcgactaacccggcggcaaaccgttttgtcgataaaatggtgcgagaacatgattttgaccgtcagcaattacatgatgtattagctcaagctcaacaattggattgggttattcgtttgatggataaacaggcacccaccagccggccaccgtctggccctaatggtgcttggaatcgctatcgcaaccagtttattacaccggataacctacaaaatggcatagctttctggaatcaatatcaagatgcgttgcagcgagcttatgaagtttacggcgttcctccagagatcattgttggcattatcggggtggaaacccgctggggtcgcgtaatgggtaaaacccgcattattgatgctttggctacgttgtcattcagttatccgcgccgcgcagaattctttagcggcgagctggaaaccttcctgctaatggcgcgtaaagagggtaacgatccgctttccctgaaagggtcttacgccggagccatgggttacggtcagtttatgccgtcatctttcaagagctatgcggttgattttgatgaaaatggccataccaatctttgggatcccgttgacgccatcggtagcgtggccaactattttaaagcccacggctggcagaaaggtggcaaagttgccgttcaggctatcgggcaggctcctgggctagataatggatttaaaacccgatattccgttgctactttagccgcagcggggctacagccaagggattctctcgatggctatcaggaggccagcctgctgcgccttgatgttggcaccggctatcaatactggtatggattacccaatttctacaccattactcgttataaccatagcactcattatgcgatggccgtttggcagttaggcgaggcggttggccgcgcgcgccaaggctattaagcttattgctatcggttaacacgttgaatattgggctattcattacgtattgacgaaggttttattgactatttgtgggtcgcttcggcgacccatttttatctatttagctccaaggtaatatgtatatccgtactcttattcatgtttattcgtgagtttgctggtctccgataggataaaaagtgtaaaatacaggcttacaaaggtcatagcctttaatttaacgtattttaaaatttattctatttagtattaaggggttatcgtgacagcattacctaattgtccaaagtgtagttccgaatttacctggcagaacggtgagcagcttaactgccctgagtgcggccatgaatggtctgaaaatggcaatgtggctgaggatgaagaaggcctggttgtgcgcgatgccaacggtaatttgttggcagatggcgatgcggtaaccgtcattaaagatttgaaagtgaaaggcagctcttcaactctgaaaatcggtaccaaagtaaaaagcatccgtttagttgaaggcgatcataatattgattgtaaaatcgatggctttggtccgatgaagttgaaatcagagttcgtaaaaaaagctgattaacagagatttagagtaatacggctgataacgggcagtttttatgatttatcggccattttctttaaccattggataaaaacgttaatttttggccactggcgttctgataacgtcgaaatgtaatagcgctgttcgcataccacttccatccctgggaagggcataatcaactcctgatttgccagacgacgcgctaccagtttttttctccccatggcgatacccacgtggttgattgctgcgagaatggctaaatcagaacgatcaaatcccatactgcgctgtgtggtatccagcgtaactccggttcgtcggctccaatcctgccattcactgatatccgagtcccggctccatgcctgtcgatcgtgtagaagcgtacattggcgtagattgatcaaatttccataaagctgatgtttttccgcatattctgggctacacactggcaccattgactcatccatcaggtgttcatacgacaacttttccggcgttttatcatcgtagtaaatggccagatctatgccaccgccgagaaaattgacgttgtcatttccggtcataatattcaggttgatggccggataatgatgagcaaaatcagcgagtttaggcaccagccagcattgggcaatcgacgggcgagaatagactgtaagagtgccggataactcctgatttttaatttctagaacttcctgattaaggtaatcaagggaggatttcagcgcccaaaatacccgttcgccttcactggttaactcaattctccggtgaaaccgctggaataatttaaaccccaattcatcttcgaggccatttatacgatggcttacggcgctgggactaattgataactcattggccgctaaggcaaaagatttatgccgagccgcaacttcaaacgtatagagttttgatagctgatagccattaagaagttgattgcggtggatataggcgttttccgggtacataggggatctgctcactttattttgtctaaatattataccgatttacattttcactacatgataagggttagttaatgtgattcaaatcgtacttatatcgtaaaatatgacctatttggcatatttgatccaatatggctcatctgaaagcgtttttttatcgtttgtcagcccctatcaactcttattcaataaagccacaagaaaactattggttgaggttggatatggactcacaaatatgggtagtggggacgttattaacaagtatcatcattattatattcgccatagtaaaactaaagattcacccttttctggcgctattgttagccagtttttatgtcggcctgttaatgggtatgaacccactggaaatggttaactccattgaaagcggaatcggcggcacactaggatttttagcagctgttattggtttaggcaccatcttaggcaagatgatggaggtctccggtgcggctgaacgtattggcataactctgcaacgatgccgttggttatcaccagacgtcactatggttctggtcgggttggtgtgcggtattaccctgtttgttgaagttggggtggtattactgattccgctggcattctctattgccagaaaaaccaatacctcattgtttaaattagctattcctttgtgtacggcattaatggccgttcactgtgtggttccaccacatccagcagctctttatgtgaccaatgcattgggcgcagacgtaggaacggtcattgtttacggattatttgtaggattggtagcttcattaattggtgggccattattcctgaagttcgtgggtaatcggttaccgtttaaacaagtacccgctgagttctctgaatttcaggtacgtagagaagaagatctgccttcgctaagcgccacattatttaccgtattactgcctattattctgatgttgatgaaaactgcggcagaactgaatatggaaaaaggttcttcgttatattcatttttagagtttattggtaacccaataacggcgatgtttattgcagcttttgtggcctactacactctaggtatcagacaaaatatgggtatgactaccctgctgaaaaaaaccgaagacagtttttcatctatcgcgaatattttattaattatcggtgccggtggggcatttaatggaatattaaaagccagtggcttggcggatactctggccgtgatcttatctaatatggatatgcatccaattttactggcctggctggtagcgattatattgcacgcggcggtaggttctgccaccgtggcgatgatgggcgcgacggcgattgtttcgccaatattgccgatgtatcccaatgtcagccctgaaatcattacgttggcgattggttccggagcgataggctgcactatcgtgaccgactcattattctggctggtaaaacaatattgtggtgcaacgttgagtgaaacctttaaatattataccacggcaacgtttatcgcttcgttaattgccttggcggcgacttttttactttcttaccttatttgatcaacaaagagatattccatgaaaaagacagaaattgataaattaattaccgactaccctttagtcaaaaatcttatcaatctggaagaggttacttggtttaatcctttgtccaccacgttggaacagggcttgccctatgtagggttgacgcaagaagatgtggctgaggcggaagcccgtttacagcgctttgcgccttatttttgccaggcgtttcctgaaacgcaaaagactcagggtattattgagtcggagatcgttgcgattccagaaatgcagaaaactctgcaacagcgctataactgtgaaattacgggccgtttattgctaaagaaagatagccatttgcctatttccggttcgattaaggcgcgcggcggtatttatgaagtattaacacatgcggaaaaattagctaaccaggctggtttactatctgaaactgatgattatgccaaactgttttccgagcctttccgcgagttttttggccgctatcggattgcggtcggctcaaccggtaatttgggaatgtctattggcattatgagtgccaagctcggatttagtgtcagtgtgcatatgtccgccgatgctcgggaatggaagaaaaagaaactacgagaacatggtgttaacgtagtggaatatgagcaagactatggcgttgccgtagagcaggggcgtaaacaggcagaatccgatcccgattgtttctttatcgatgatgagaattcgcaaactttattcctcggatattcagtggctggaaatcgtctgaagcagcaatttgccgagcaaaatatcctggttgatgaggatcacccgctgtttgtttacctgccatgcggtgttggcggtggccccggcggcgtagctttcggattgaaattagctttcggcgataatgtacactgtatttttgccgaaccaacgcattctccatgtatgttactgggcgtgtatacccagctacatgacaatatttcagtgcaggatctcggcattgataatataactgctgcagatggtctggccgtgggtcgcgcctcaggtttcgttggaagagcgatggagcatctattagatggcttctataccctgagcgatagcgaaatgtatgacctgctcggattgctagctcttgatgagggaatccagctagagccttctgctctcgcaggtatgccaggagcggctcgggtaacaagttctccagattatcttagcaagcatggttttagcccagagaaaatgaaaaatgcaatccatttggtctgggcgaccggtgggggtatggtgccagcagcggaaatgagtaaatatctcgctaccgcgaaaatttaggttagctgcatttaatctcagttgacgtgaataaatgatattcaagggccaccttattttaggtggcccctgttgttaatggtgttagccaattcatcggcatcttcattgaccgatatattttcacacagagttatcaggcttctggatgtccgtctatagctgcggctaaatctcgatattcttcacattcagtaccgcataggtctttaattgtcgccaattcggctttagccagatcggggcgacctttaatcatataagcctcaccgagatattcgcgaactttaggataatgaggatcaagggcaattgagcgttgataataactaattccttcgtctgtacgacctaattttcgggtggcataaccacgataattccatgcttcacgggtatttggttgttttaacgtatccaatagatccaaagcttcctgatagcggcccgtttttgccaaatgatatgcatactgtgttttatcactgtcgctgaccatgctggttttttccaccacacaactattggttttggtgtcataaacctggccctttgggcaatccggcgttttattcgaatcatctcccattgcatgagttagtgtagggaccagtaataaactggcgagcaaacatatcgacggtaattttttcatagtattagaagccggatggcttttcatcatgatgtcctgttttgaggcaacatcgagtgtcgctgttttcacggagagagtagcaactgatgaccgcagtgaggataaaaactggctcaataactagccatacccgcaggggccactctctaagtaaatactgaatcgcaggataatcaaggtgggtatgtttataagaataggggggatattcgtattcttagggcttagtggttaacgggtgctttaactaactattcaataagattttttggttggttgctatgatattggttctcgatcagattattatcagatacgaatttgatgacgaaaattagcgatgcagtcaactcaaaattggttaggttaataagaagataaatatatctgtaattatagagtacgtagccagatactgccgcgtactccattctggggaaaaaactttgcaatcatctatcataggcatgataggtttttgattagcggtttggcgtaatatccgatgccaaacggtctattagctctacgacttcattacttgccgtctccatatgttcaagagccgacgtcattgcatctatatcgctgtcaaaaaaagcactaagcgctaaacggccagaatgatgaactgccgcatgaggtttttctaacagttgataagcagagtaatgggcaagattacggccatcacctgctgcataccatttgcctaaacggcattccgtgtgcgaattcacctgaacactatcgttattatctagcaatagtttatatatttgtaatttccatatgacatgatcaattttaacaatgttaagaaactgtaggttggtaatgaatgcaataattgattgcatatgagaagaacgggtaataacgatattgattgaatctacgatattagaaatatctttcttaatatgctcaattaatggtttttgttctgatactatgctacaaactttgactgtattatcttcaatagattttgttaactgaaatatatcatcggtactttctttgacttcgccagacaatgattttatttcctttgctatcacgctaaatccgcgacctttgttccctacatgagcagcttcaattgctgagtttattgcgataagattagtctggtttgatagtttgtttatttcggatacgcaacctttaatttggtcgattgattttctaaactcagttaatgaatcggtactatggttagcattcgtctcaatatgaacaataaagttgaccagtttttccagcgcttgctttgcctcgtcgtttctttgattgagttcgtctattgcattttgttcgcgtttgaggtcgttgctggaattgagcagcgagtcacgaaccatctctagagttgaaaccccggttaaaagttgctggcaaataatcctttcgtagggcgtgcgttgagagatactctccgtgttcgactccgttgaatttaagggggtaatatcatgctgtaaatttgacttagtagagaataacatctgatttattttttttagcatagtgaacattcatattgttatattgacggaatattttatactttaggtgttcttaaaatggtgatccaagtcatatcagttaatatttaatttttattataaaaatatgagcgattttataaagaaaatgaaggtttattattgatgttgattctcggatacatatatggagaaaggtagggggctgacggcgattaactgtgttgttgaaaggcttaatgagggtgaccaacaaaagctatttaaatttattattgaagttatctatacggaacgttaattttaaactttacatgtaaaaacgatgttcaccgatttttttatcagtaaaattttccgtttgttacacggaaaagagcaacggtggacatgaatagattattatgagcgctattgatagtagcggattataatttctaagaatacagcagaagttaattcataatatgttcggtatataatcaatttaaactgcggttatactctttttgcctacttctttatacacactttttggaataaacggcagccagtcaggttgggagtcgaagccgccgatcagttgccattgggtgtttacggaagcagagatttcaattaagcgcatgactatatgcttaccgcaacggataaagcagggaactccgccacagctcagggttcagtcacgattgatgcaatcggtccacacttgacgttgcagatttattcgtccaacgacatttttgtaggaaatattatcggtaacgttcggccgactttctctggtcagatggatccgggtattcgtattaccgtttctattgcggggggaacatatgatgtcatagcggatgaaggaggcgactggagccgcacagtacctgtttcgccaaggatgactcttgggattacgagaatatcgccgcggatgttgccggtattacccgtctgaaccgccaatatttagagccgctggaatgaaccaagaggtatggactttgtgcgtcgctaagtttgtagggtttgtcttttgatttagcgcctcggatagccgtattggttaacggcatgagtgttccttacaataaaggggtacattattgttcgaaccgattataccctgtttagtaccccgataacgttaggctgtagcgggtttgaaaggtctgttatgggatgtggttttaatttaacttgttgttttaaattgaataaattttttttgggatgtattgggaaggtgtcgtggtgtccccgactggaatcgaacttttatcttaattacatgtttttaatgcttatttttaattttaagttaattgtttatacatatcgctatacgtttattttcgggcttatagcgatatgactgataatcagttttcacatgactaattctaatcgatagaaacttcacgaatttcttgatttttacttactgtccttccctgtcctttattagtgttcattgcccttcaaaatcagtcccaaaaaatcagtcacacaagataaactcattgcctgctttttatactaaaatcacttgttttattcccgcaaaaaactagtaatctaagggcgtccgatagactcttaagcaaaccaatggagtattcagtaaatagttgttaattttacaaagtgttacatttattttttttcaataaatttcagcttaattaactgaaatttatattaactcatattaactcgatacgaataaatactaactgatactaagtaataccaactcaatgatgaaaaacattggatatttttattaaaaggtaaaaacacaagaaatagttttgttgggagtgccaagtcatgaactttacagaaagcatattgcgtgtaagtctataggcatccgaggggatttagttgtattgctctcagattatagttatttacgtttctttacgaatgaggctgcttatccatatttatctatatttatcaatattcactcttggcagtacaaaaaataactacaaaccagagtgtgatttggcatagttctctaaccctatatttacatcggctaggggaaatgtaagtctaatagtgtcttcacacatttatacaagtctattaaaggataactttatggagcgggattctattgccataaataatatggcaaaaaggttaatacggttacccgatgtgatgtctattaccgggttaaaacgttctactatttatttcaagatgaaagaagggaacttccctaacaatatccctatcggagaacgatccgttgcatgggtagagggggaagtaattaattggattgatggaaatatttcaaagagagaaatgagatgctaaaagaattaccgttaactccgcatgatgccgaaattaatgtgatatcaacgtatcaacctatgttgttcacccctgagcagggggatggtggttatgcgattcgagtaatagaaatctatcggttacataacatgttcccattgttggataaattcgaagaattaacgggatatgccgcacctaggcttgtttgcacgccagatgaaataaatatgttagtcgagcgaggacgtaagattaaccaacaggaagaagttaatgtaagaactattgaaaatgaattaaacctagtcggccgtgagctgggtaatgctcaacgaggaataagtagtttatcaagttacaatggcagtgtccgtagtttagttgcttctgttcaggcaaagtctgaacttacacaacgacgtttagctgatgcccaagataaactagcggctcgtagaggactattagggctgttacgtagtcatgttgaattgatgctgagccatagtgttaaaggattcaaaaataagattatggagttcttaccattagattctttttcatccaatacatacaaagatggttggagtagtactggattaaaatcacatgtatatgcatggaatgagctaaataaattagagttagcactgaaagagatcatatctaggtgcaccgtacctacggataagtatttaattgctcatggcggagttgaattatcaaaattaaagaaaaaatattatcagcctgagtcagagggaatgcgagattttatgtcggctgatgatttttctaagttaatgctgagtaaggaatcatgggctaacaacaaggttaaaattgcaaagcaacatttataataatttattagaactaacccctatattaaataaaggttaaaaataatggtcagagttaatcctcctgctatggcgggacagtttcatgcaaattttgttggtggaataaaatcacgatttgatagtgagaaaagtttttcaatatcggagtcagcggagaatcagttgcgtatatctatgctggaatccggttggatgatgaataatattactttatgggatgtagatgaagaagaaggacaaaatattgaaattggtgaatctgctttacatacaggacgaactattgaaggacgttttagccgaggattaaaaatagagggttctaactattcactcgcagatacggattcttgtgcttcgctttcgtatcaacgaatgagtgccattgctaatgttgggggtattgaacattttacccaaactgtttctgatttcttcggcatggctatttcattggatatgctgagaattggttttaatggtcaacgtatttcttatccgacagatccaattgctaatcctaaaggtgaagatgtcaatataggttggcacgcaatagccaaaggatttaataacggttctcaagttataactgacgccatgacattgggggagggcggggatttcccccatttggatgcgttggctaatcatattattactgaaaagatacccgaaagttttagggaagatccccgtttagtggtgatggtaggtgcagagttagccgcagcggaacggatgcgcttatttaactccgcagatcgtccggctgatattgcagcagcgcagatgttaacgagttcggtggctggtcgttttgcttttgttccgccatttatgccgggtaaacgcttggtggtgaccacattgagtaatctacatatttatacccaaaagatgagtagacgctttagggctgaatttattgatgagcgctgcgtgtatgaacacagttattggcgtaatgaaggctacgcgttaggtaataattctctgtatgcagcagtagatgaaaatgcaattagcttagtgcaaaggtcaggtagctaatgacaaattcacaattaactaccggctggatatgtgtggccacggaaggtgagacaatagacgggcgtcagattgaatcccaatggttggcggatatggccaaaatctacgatgtgcgcacctacacggcgctgatttgggaagagcatttacgtgatagggataatttaggggaagtgctggcgctgcgtagcgacgtacagaacggtattacccatctttatgcccgaatccgccctacggccaagctggtgagtttcaatgagcaggggcaaaagctgttttgctccatcgaagtggaagaagattttcaggacaaaggtcatttttatttaagtggtttggcggttactgatagccctgccagcattggcactgaccggttacgttttagtgctaaccgttcttatttttctaagcgtggtgttaaagcaaaaataagtaagccaagggaatttagtttatcagacgccactattatggctggtaaaggctgggtttccgcaatagcgctgagttaattcttatattacagataagaaatacccggctgctgggccgggtatggttctctactatcggaaaataacaatgataaataattcaattaatgctgatttgactatctcactcaccgttatttccgtcaataaaataggttcggatatatacggttatattactgacaaaagtatttatgctttaggttctatgccacggcgttttaattcctgccgggctagctctttaaaccaattaccaaggcttacgccatctttagccgcttccgcattaagttgttcacgcagttctggcgcgatacgaatttggaatgttggcgatagaccttcacctttcgggcttttatctcgttttatagttgacacgtacgtacataacctcataagctgtctttcgttaggtacgtacgttaacacggcgtaccgacaaaatacagcggcccgtcaaggtgctaccaacaccaagccgggcctgaccatcatgttagaggaactaacgcaatggctacgtcaaagtgtacctacatctttgcggcgatcaaccgcacccaacagaaaattagccctgtcatgctgcatatcaccgcagagaatgagaagacggcccgccgccgttatgccgcagattacatactgctttttgccgggcgtttgcctgtgcaggaggcatagcatgacgactaaatataatttagcgcagggaagtgtagataaagttctacgggccatgctggtttcagaattaatgagagagttattgtactcaaaaaatgaaaccccacagcctcatgttaattcagtcaatatagcggctgtctttgattgtatttatgaagatttagattctgtattggataacgaatttgacaggggaaagaatgaaagccgttaatttattcccgtcactgttatttcttttcatatttacaatggagacgccgcgatgagcagtcaatttgtctctgaaacgctgcaagcggcccgtgggcgttggccgcatattttgccagcgttgggtattaccgtgccggataatggtaaacacggcgcttgcccgaagtgtggcggtagtgatcgtttccgctttgatgatcaagggggccgtggcacatggatttgtagccagtgcagtcatggtgatgggctggatctcattcgtttggtttctggcaacggggcatttcaggcggcaactgaggtggccaaggcgctagccttaccgaatgcaccgcaggaagcgattaagcctgccagaaatgaaatccccgaagagcgaaaaaaggcgatggtggccaaggcttaccacgctttgctagcccattgcagcagcggagaaaacagttatctggctgataaggggctgtctggccatagccaatccattacgcaggatgttcataaaacgggagggatggacttcccggcaggttctttgctgttaccgctaactgatatcgacggcaagttaaccggtggccagcttatcagcccgttaggtgacaagcggttattgcccaataccgtacttaaaggggcgtttattgcggttcacccattagaggcaggggataacccggagctggttgttatcactgagggttatgccacagctttaacgctggatatgttaactgatgggctggttgtggcggcagtcgcggctaacaacctgccgaacgtggcgcaacacctgcgccataaatggcccgatgcgcggttgattatcgccggggataatgattttgatgatggtaaagagaacaccggcaagcagtgggccgagaaagccgctaaagcagtagatggttgggtatcactaccaccaacccgtcataaagcagattgggatgattaccgccgtgataacgggctggaacgggctaaagaagcctttcgggaagaaatgatcctgtttggtaaaggcaaaaccaaactgccgcaggggttccgcttaacgcaggaatatctttggtatgacaagttggtgaataagtctgatggtgataccgaaatccgcaatatcaaactgtgcagcccggtaagagtcacggcgattacctgcgattctgacggcggcaactatggccgcttgctggaatgggaagacaccaacggtatcagccgtaagtgggccatgccgatggagatgctcagtagcagcggggaagagctgcggcgcattctgttgagtaatggcctgtcttatatcagtaccaccgggcaggcgcgggcgcatttgatggaatacctttccctgtgcaagccagagcgcaaggtaacttgtgttaataaaaccggctggcatggttcggtttatgtgctgcaagacgaagtgatcggcgttggggctgagtcggtaatcttacaaaccgccagcgtacaggggcgggatttcaggactgccggaacactggacgaatggcgcgatcaggtttcccgttattgcgtcggtaatggccgggtggcgttttcggtcagtctctcttttgcctcaccactgttaaaattggtcggtgtgggcggcggtggttatcacctgaaaggggaatcaacggacggtaaaaccaccacgatgaaagtggcagcttcagtttgtggtggcactgacttctggcatacgtggcgctccaccggtaacgcgctggagggcaccgccagccgccgcaatgatgccaccctaatgttagacgaaatacgggaagtggatggcagagaggccgggaatatcgcctatatgctggcgaatggccaagggaaagcgcgggcgcgtactgacggcagtttgcgcgaggctaatcgctggtgtctgttgtttctgtctactggtgaattgtcgttagtcgaacatgcggccaacgccggagagcgtacttatgccggggtggaagtacggatggtacagatccccagtgattccggtaagcatggtgtatttgaagagctgcacggttttaccggaggtaaagccctgtcggagcacttggaacaggcggttgcttcctgctatggcgagccgttccgtgcttggttgcggctgttaaccgcagacctgaccggcatgaccagcaaggccaagatactgctaaaagaatacacccggctgcttaccccggagaacgccggtaatcaggtgggccgcgcagttacccgttttgcactggtggcaatggccggagagttagccacacaagtggggatcaccggctggccagagggcgaggcgttccgggcagcacaaacctgccttaatgcgtggatgggggatcgtggccacaccgccaatcaggaagacgccgccgcactggaacaggtgaaagagttcattacccgtaatcagttcagccgctttgctgactggcatgacgagcgcagccgcccggctaacatggtgggcttccggcgagtggataaaggcaataacaaagaagatgcggtgacaactttctttattttggccaccggttggaaagaaatctgcaagggatttgatgccaagaaagtggctcaactctgcgtcaaggccggttatctcgatgtgccagaggatgcccggacacagaaaaacattcgcctgccagaaatggggctgaaacgggtctatcagtttaatagcacggttttaggttaatacacttacgtgagtcttatttagaactggtaacactggtaacagaggtaacaaccataagccgcaaggggtagagctgttaccagtagtagagggctattggtaacactggtaacagaaatcagcctgttaccactggttaccagttgataatgcctagtggtaactaattttatctatataaatcaatggtgttaccagcgttaccactgataccagttacagacgtaagagacaatataaaaacgagtcagttcgaggcttattttctggccggcggttctggctttaaatagaggggccatatcaatatgcgagtttttaaagttatttgtccagattgcggtacacccgctcatattcgtaaaactaaccgcaagcatagccatatagcggatctctattgtgcctgtaccaatgttgaatgtggccatacctttgtgatgaatgcgaccttttcccatacccttagccccagtgcgttaacgcatagccggttaattaaggacttggtagaccatatatcaccgcaggaacggcaagaggctatccggctattgcaagtggcccataaagatgaggaacaacagcaggcaatcagtgacgcaaaaccgcaaattacgcgcagggtgagcaaggattacgtgaccaaccgttagcccggtgttaccactctggcgctcgattttcttcccggccctgtactgtgtttttcagttagcccaaaatgaccttgccccgcgaagccacgcccggcaagggtttcaacatttcccccacgctattatctcacccaacttttcccatcctcgccacgtaaaataaaatacttgttttaaatcatatgattaaaactttaagcggtaaggttagaaaaagcgaaactgaaatttagtgaaattcttttcaatcttttcagttgggattatcagccagagccccagccacggcgcgggctggcgctagggtttgtaggaatataaaactgaaataagtttataaagcaaagtgtgcaggcgggtgcggtgtagtgccatttccgtcatatttatatttttccatgaaacgatagagaaattcagtcaattagttttatcaacttgaattgattatttgatccgtgtcacagcagaaaatttacttgcaatgtgcatgatttttatacttgaaattgctttcaataagaattcttaatgagtaatgtaacttactattactgaaaataaatcgaggtgattatgtcgttacagctcttaagacaagccattcaggctcgtaaaccaatttcatttgaatataataagcctggaaagattccgggtgaacgaattggtaatcctcatgctatttttattatgagaaaaaaagaccaatctgagtctacaaaagtacatatagttcaagtgggcggtgtcacagatagcgcacctaatttcccagagtttagactgtttgatattgctgaaatttcaaacattaaaattattgatgcaggtgctccatttgcaattgatggtggctataatcctcattgggatggatataagaatgtgattgcgaaggtataatatgagcattgaccattcatatttgattggaagagatgatgttaatgatttggtattaaatatatcaggtcttgatgcagactctagggatgtatctacgttaagtgcaaatatttttgctcattgcactagcactggatctccaaaatttacttgccaattaaatattggtcatttgcaaagtctttatcaacacctttcacaatatagtgttattcgtgatactgagtctgtaagtactggtcgttttatagagatccaaagcaatcatgaggaaataatgagagttttggagcattcggataacacttctttagtattagcattacagcacatcgtaagtaatagacttacaaatactgatattaatacgattttagggcgaaaagatgctcttgatgagtatgagcgaatgtatgaaaatgctaattattataatgaaatagaatggcagcgtttttttgaaaggaatgagtggatatttgggtatggtttaaattataaatatttaaaaatcctacagagagaagcacacatctctcatacagatctcaatgggtctaatgatgttataacggattttttattatcagactctagatttactaaaattgttgaactgaaaacacctacaacaaacttatttgtcaatcgccagaatagagctgattcttggcgcttatcaagtgagcttactgatgctgttagtcaaatattggcacaaaaggcaaattgggaaatagaaagccaaagaagtaactacacctctgatggggatttgataagagaagaaacacatgatgccgaatgtatattagtaatcggatctatatcttctattagtgggggtgaccgcgaaaagttaataaaaagaaaaacactagagctttatcggcgtaatttaaaaagtattaacattctgttttatgatgaactattagaacgcgctcgatttattgtaagaagcgccgaaattattgaaaatgccattggtgaaattttagaataaacatcaggcggcattcttatttctgtaccatcaatatacaaatatggtgctagtataaattatcactataccactgcaacatatccctacgtccttcaagatattgtgcatggttataagttccacggatggaatttttatcaacatgggcaagctgggtttcaatccatgcactgttatagcctttctcatgcaagatagtgctcatggtgtgccggaaaccgtgaccggtggccctgccgtgataacccagcatcttgatcaccttattgatactcgcctcactcatcggcttaccggcatcattgcggccggggaacactaacttataattccctgtcagcatctttagcttttcaaggatcgccaaggcttgtgcagaaagtggcacaaggtgagggcggcgcttcttcatccgttctttaggaacctcccacaaggcattatccagatcaaattcagaccattcagcggcccgcagttctatagttcttacgcccgtgagcattaacaactgggtggcgtatttggtcagtttgctgcctttatagttatccaatgcctgaataaattcgggtaactcactttcagtcaggaaagggtaatggccattcttggggcggtttagtgcgctggccagatccggggctgggttataagtggcccgcccggtcactacggcatagcggaagacttcaccacagcgccgcctgattttcccggtgagttccagtgcgccacgtttttcgatacgttgcagaacggccagcagttccaacggcgcgatctggtcaattgggcgcttgccgatataaggaaatacgttgttatcgaagccacgcataaccgtatccgcatattctggtgtccaagtgggtaatttggaggtgtgccattctttggcgatagcctcgaacgtgttggcgtgggaatgctgtagggctatcttttcagctttgcgggcatcactggggttaatgctgttggccacttgtgctctggcctcatcgcgtttcttacgagcatcggctaatgaaatatcaccatacaggccaaaagatatcattttaggcttcccggcaaagcggtaacggaagcgccaacccttggagccattgggttcaatcaatagggataggccattgccatcattcaaggtataggctttatctttggctttagcccggcgaatttgaatatctgtgagtagcatgtgtatagccctaaagatcgaacctagtgttatacgcaatcctatacacatatgtgtttagattccactaaacattatggggtctctttagacgccaaatgtctatttatcgttgttttaacaggattttatggacttagtgggatgtgctgagaagtgctaatggtgtccccgactggaatcgaaccagtaactagcccttaggaggggcttgttatatccgtttaactacggggacatgccatgatttttgctgttgataaaagcagctgggcgtcattatacctattttcactctgaaaataagcagttagcggtttgtttgtttaaattgtcgccagttatcgcttaaaaatgcttatctcccaatgcgccagagaatgctggctccgatcggcggttagatttactttttgtacaaatccgtttttttctgggtatttcctttagattttttgggttttctcgtcatatcgctgcgtatttgggcatggcttatcagagcaaatataaaggaaccaccgatgatattgccggcaagcgtcgggatagcgaaggggtaaataaattcctgccatgaaagattgccgctaaataccagatagaagatctctgctgagccgacgacgatatgagtgagatcgcataaagccaccagataggtcattaagaaaatcacccagattttagccgcgccagcagagggtagcatccacaccatggtggcgataatccaaccggagagaatgcctttagtcaacatttctgctggcgtattttccataatatcctgagcaatgctgataaaagcggcgtgcgtcgcgtcatcaaacaagggaatatggataaatgatcccgcggccaaggcggttccaattaagtttcccagcaacactaatccccaaaggcgaaataaaatactgaaattcttaatgctgggtttttgcataattggcagtaccgcagtgacggtgttttcagtaaacaactgctggcgagccataatgacaataataaagccgaaggtataaccgatattctcgataaaaaagctagcgggcgcatcggataatctggcgtgaaaaatgcctttcgccattaaagatgctcccatagataagcccgcagcaatggccgatagcaatagagccaagccgtcgcgctccagttctttttcgccttcgacgcgaatttgctcgtgtattgcggccgcgcgtgaagggagatttttctcattaacatcaatctcttttccctgctttttctcattgctttctacctgaatatcgccatcgttgtttttatggtcattcatgtttttctcctgaggaaaccggattaaattttcaaagttgatagacgggaggtcctcgattccattattaaggatagtggcttttttacggcgaatattgagatgggaaagaagcgattattgagaaaggaaccgaaacagtcagcaaaagtcagctttggctgttttttctacagaatattgatcttatgccgaatattaactctataaggttaggtttcgggataggcccatgctacgtaagggttaggccttatgctattattccggttcccggttgttgaaaatcttgcggttaaaagacgaatcccatgttggaagcgaaaaatctgagttgcatacgcgacgaacgaaccttatttaagggactgagtttctgtatcaaagcgggggatatcgtgcaggtggaaggccccaacggagcaggaaaaaccagtctgctgcggattttggccggtctggcgcaggccgatgctggtgaagttcactggcagggagcgaatatcctgcgggatcgcgcgggttatcatcaggatttattatttctgggccatcagcccggaataaaatcggtgctcacgcctttcgaaaacctggctttttatcaatcggctcagggtgattttgacgaaaatgccatctggcaggcgttagaaaatgtggggttggtcggctatgaagatttgccggttgcccagctttctgccggtcagcagcgccgcgtagcgctggctcgcttatggttgagtcaagccccgctctggattttggacgagccgctgacggcgattgataaacagggcgtaagtgagttgatcgctttatttgagcaacaggctgcggcagggggaatggtgttgttgacaacccatcaggagcttggcggcgtgcgtcagggggtaagaaaaatcagcctgattgactcggggaaaaactgatgtttgtcagcgtattacgtcgagaattaaagattgcgttcagaaaaggtgcggagattgttaacccactgtggttttttcttatcgtcattaccctgtttccattgggcgttggtccagagccgcagttgctggcgcgtattgcgccaggcatagtctgggtcgctgctttgttggcttcattattatcgctggaacggctgtttcgggatgattttctcgatgggtcgttggagcaactgcttttattaccttcgccgctgccgctcacgatgttaggcaaagtgtgtgctcactgggtcgtgaccggattgccgttgctaattctctcgccgctggtgggcatgctgctttcgctggatgtgaataccggcatcgccgtagcgctgactttgctgctggggacgccgacgctgagttttatcggggctatcggcgtcgcgcttacggtgggattgcgcagaggcggagtattattaagtttgctggttttacctttatatataccggttcttatcttcgccaccgcagctattgatgccgcctcaatggggatggcgattgatggatatctggcgattcttggcgcgatgctggccggtagcgctacgctggctccttttgccacggcggctgcgttgagagtaagcattcattaatcctatttaaatttacagattttgtctgatgaattggggcgatatctggcgaccatgcagtgacgcatcagcttgaaataacatattttttattgaatgtggtagccaacgccatttagagcagattgcgcaccgcaacccgtatcggcttagttagcaggataattaccaagacgattactgtcatttttatagtgagcaatgaccaacatgtggaaatggtttcatcaatttgcccagcctgaaaggctgtacagagtctgcggtcgctttattccgtggttcggcgcagcggccatcatttgtctggctatcggttgggggggaggctttggcttcgcaccggctgattatcagcaaggtaacagttttaggataatgtacctgcatgtgcccgcggcgatttggtcgatgggcatttatatgtctatggcgatagccgcctttatcgggctggtctggcagatgaaaatggcggatttggccgtggcggcgatggctcctgtgggggcggtatttacctttattgcgctggctaccggttctgcctggggaaaacctatgtggggaacctggtggttgtgggacgcgcgcctgacatccgagttggtactgctgtttctgtatatcggcgtgattgcgctgtatcacgcatttgacgatcgaaaactggccggtcgagccgccggtattttagtattggttggcgtggtgaatatacctatcatccatttttccgtggtgtggtggaataccttgcatcaaggctctaccgatatgcagcaaaccatttatccgaccatgcgtactccgctgcgttgggcaatcttcggctatctcttcttttttgccactcttacgttaatgcgtttacgtaatcttattttacatcaggagcgtcatcgcccttgggtggcggaattgttaggtaaggagcgctcgctatgacaccggcattcaactcttgggcggattttttcgcgatgggtggttacgccttttatgtctggctggcggtggccgtgaccttgctgtcgttgcttggtttatgggcgcataccctgtggatgaaacaagggttattgaagagtattcgccgccaacgtagacgcgatcagcgaattcgtcaggcgcagcagcgggagagaaaataatgaacccacgtcgaaaaagccgtctgtatctggccttagtggtattaatcggcataggtttgaccaccacgctggtgctttatgccttgcgagccaatattgacttgttttataccccaggcgagattttacaggggaaggggcctaagcacgaaaaacctgaggttgggcagcgtctgcgtattggtggaatggtgatgcccggttcagtaaaacgcgacccgcagagcctacaggttacttttaaggtgtatgacgcgcgcggtgcgatcgacgtgacttacaccggtattttgccggatctgttccgcgaggggcagggtgtggtagctcagggcgtttttgctgaagggaatcgggtggatgctaaagaagtgctggctaagcatgatgaaaaatatacgccaccggaagttgctgaagcgatgaaagaaaatcacgttcgtccggcggcggcttataccaacggtcagaacgaggggaacgcttcatgatgcctgaaatcggcaatttcctgttatgtctggcgctggcgatatcgctgctgctgagcatttacccccagtggggagcggcgcggcaggacgcgcgaatgatggctgtagcacgaccattgacctacggcatgtttgtgaccgtcgcgctatcgtttatgtgtctggtctatgcctttgtagtgaatgattttaccgtttcctatgttgcggctaactccaatagccagttgccggtgtattaccgaatcgctgctacctggggggcgcatgaaggctcgctattactttgggtgttgttgttaagttgttggtcgctggcggtggcattattcagccgtcaaatgccgcaggacgccgtggcgcgagttttatccgtattaggcatgattaccggcggtttcctgctgtttatcatcatgacttctaaccctttcacccgaactttgcctaatttcccgatagatggccaggatttgaatccgttgctacaggatgtcgggctgattttccatccgccgttgttatatatgggatacgtcggattttccgtggcgttcgcttttgccatcgcatcgttgatggcggggcgtttggataccgcatgggcgcgatggtcacggccctggacccaggcggcctgggtattcctcactctggggatcgtgctgggttctgcgtgggcttattacgaattgggctggggcggttggtggttctgggatccggtagaaaatgcgtcatttatgccgtggctggccggaaccgcgctgattcactctctggcggtgacggaaaaacgcggtactttcaaagcgtggacggtgctgctggcgatcacggctttctccctgtgcttaatgggaaccttcttggtgcgttccggcgtattggtttcggtgcattcttttgcctccgatccggcgcgaggtatgtttattctggcctatctggtgattgtgatcggcggttccttactgttgtacgcggtgaaaggggcgcaggtacgcagccgtactcagcatgaagtgttctctagagagacatttttgttaggaaacaacgtattgctgatcgcagccatgctagttgtactactggggactttgctgccgctggtacataaacaactggggttggggagtatttccatcggcgaacccttctttaataccatgtttacttggctgatggcaccgttggcactgttgctggggatagggccgttggtacgctggcgtcgggatgaaccgagcaaattgtggcgtcgtttgggcgttgccttggtggcaaccacgttactgtcaattttagtgccttggttaatgcaggacagtatcgccggaatgacggtagtgggtttgatgatggctttctgggtcattattctgacgctaatggaattgcatgagcgagcaacccatcgccacggtttctggcgcggcctgactcacctttcccgcagtcattggggcatggtattagggcatctgggcgtggcggttacggtaattggcattgcctttagtcagaattatagtgttgagcgcgatgtccgaatgaaatcgggagatggtattgatatccacgattatcactttgttttccgcgatgttcacgacattaaaggaccaaactacaccggcggcgtaggtatcatcgacgtcacccgcaacggcaaacccgaagcgacgctgcacgcagagaaacgttattacagcacagctcgctccatgatgaccgaagcggctatcgacggtggcctgactcgtgatttgtatgcggcgttgggggaagagctagaggatggttcctgggcggtgaggttatattacaagcctttcgtccgctggatttggtacggcggagtatttatggcggtgggcggtattttgtgtatgttggacccgcgctatcggatgagtaagaaattaacgcgcggtatcgcaccggaggtacagtaatgaagtctaagttattgtttattccgctggtgttgttcctgctgctggtggtggcatttttagtgcaactgagccgcaatgccggaggggaagatcctacgatgctagaatcggcgctgattggtaaacccgttccgacctttaagctggaatctctgggtcaggcaggaaaaacctacgatcaggcggtactgcacgatggtaaacctatgttacttaacgtgtgggctacctggtgcccgacctgccgcgccgagcatgaatatctgaataaactggcggcgcagggaattcgcgtggtcgggctgaattataaggatgaccgtgccaaagcggtgaactggttgaatacactagggaatccttacgcgctgagcttatatgacggtgatggaatgctgggattggatttaggcgtttacggcgctccggaaacctttctgatcgacggacaaggtatcattcgttaccgccatgcgggggatcttaacgatcgcgtctggcagcaggaaattctaccgttatataaaaagtatcaggagggcgcatgaggctaatcagtctggccctcggtatgttactgagctggggcgcgttcgcagccattgatacttatcagttcagttcggttcaacaggagcagcagtatcgggaattaaccgagcagctgcgttgccccaaatgccagaacaacagtattgcggattctaatgccattattgccgcagatatgcgcaataaagtgtatgaactgatgcaacagggtaaaaccaaacctgaaattatcgattatatggtggcgcgttacggcaattttgtcacttatgaaccaccggtgactgccgctacgctcattttgtgggtggggccagcgctgtttgtgctgatcggcggggcggtcgtcattttacgcgggcgtcgccgtaaccagatgcttgctgaagacgagttaccggagcaggaacggcagcgtctggctgccatactggcgcagaatgaagcggaaaaccggaatgtggcaaatactgacgggaaacaaccataatggctttttggctaatagtaatcattgcgctggccggagcgggtgccctgttagtggttcctgcaatgaaacaaagcaataataaccgcaaaactacgcgggatgatctgaataaagctttttatcaggatagattaaacgaactggcagaagacgaagcgcagggcgtggtcaccgagcgaccggaactgatcaaagagctacagcagaatctactgacagatattcccgagcaaccggcggaacaatccagcccgatcagtcgttgggctttgttgcccggcgtggtgattttggtattggttgccataggattttatgtcaaaaccggtggtttaacccagttgcacgcgtggcgggaagtacaggcgcaaatgccggagttacgtgccagagttgccaatgaacgagcagagccgctgacgatggaagaagtggcgcgcttgggtttagggctgcgcaccgctttgcagcaagacgataacaatgttaacgactggatgatgctgggccgagtgggtatggcgctgaataatgcgactaccgcgacgcaggcgtttgaaaaagcctatcagctcgcgccggataatatggacgtgaaactaggctatgccgaggtgttaacccgttctaacgatccccaagataaccagaaagccacgcaaatgctgcgtagcatgttggcgcaggatcacggtaacccgcgagtgttgagtctattagcatttaatgcctttgagcagggagatttcaaacaagccattggcgcgtgggaagttatgctaaaattgctgcctgccggcgattcccgtgctgaagtaataaaacgcagtattcagcaggcaaaagcacagtccggtcaggaaacagctaaactggaagtgacggtttctttgtctcccgatgcggctaaaaaattaccgcagcaagggactctgattatttcggtcactgacggagtgagtccggtgcctgtggccgttaaacagctgccgctgagccgattcccactgacgttatcgctggatgacagtaatgcgatgatgccggaatcgttgctttctgctttgcatcaggtaaaagttcgggtgcgtttatcgctggacggtacggcaaatcctcagcgcggtgactggtttggtgaaagcgtggtacaggaattcagcggtaacgggcagattagcgtccagataaatagacagatcccctaagcgcaggggctgaacgtaatttcatggagaaacatatgaattttcgcctgacagggctggctttcgcgagcgtattattggtgggttgcgccagttcttcaccggatcagatggaacaaggccgctccgatccgttggaaggttttaaccgggcgatgttcaactttaactatgaggttcttgacccttatgtagttcgccccgttgccgtagcctggcgtgattatgtgccgcagcctgcgcgtaacggcgtgagtaactttatgggtaacctggaagaaccggcgagcatggtgaacagcttcctggtcggtgacccgtacaaagcgatgaagcactttaaccgtttcttcctcaacactttattgggtatgggcggtctgattgacgtcgcgggtatggctaaccctaaactggcaaaagaagtaccgcatcgtttcggtagcaccttaggctactacgatgtgccttacgggccttatgtggtgttgccgggttatggcagctttaccgtgcgtcaggaaggcggcgactgggctgataacgtctatccggtgctgagctatctgacattctggatgtctgcgggcaaatggatgattgaagggattgaaactcgtgcgcaattgttggattccgatggtctgttgcgtaattcctccgatccgtacctgatggtgcgtgaagcttacttccagcgtaacgatttcctcgccagcggcggtgtgttgaaaccggaagcaaatccaaatgctcaggcaattcagggcgatctggaaagcatcgactcagccaactaatcagtttgatatatcaaaacgggttgatatataaaagcggattgatatgtgacagataaaaaaagcgccttcaggcgcttttttgttgccgcgaattcgtcaacttcccgattcagggcgcacagtcggataatccaccctacggcgcattatccggctgatttggggttagaacgcgtagttaaagttcacgccgtacagcattgccgtacctttggagttgaactcgtagttcgtgccgcccaatgctggtggcgttttctcgttgatggtcacgttctggccgtgcatgtaggagatacccacgtcaacagatgcgtctttgttgaacgcataggtagtaccggcactgatccagaaacggtcctgatcggggatcgaaatggagcggttttgagctggaaccgggctatcatcgaacgcgataccggtacggaaggtccagttatcgtcgtagtaataggttgtacccagcgcgatacggtatgcgtctctaaagccttcgtgcttctcgaacagtaccttaccgttgttacctgtggctttcagctcctggaattggctccagctggtgtaggccaggctatagtgaatcgcccactgcggtgccactttgttataaccggacacttcccagacttctggcaggttcagtgtcagagcaccaggaacgattgcaccgccagttccgccaaaggctactggtagctggttgctgtaatcgccatcaaagtcgattttcactttagaacgataagtgaagctgtagcgattttctttatcgatttcataaagcacgccggcgttccagccgtagccccactctttaccttccatattggcaacttcggtacgcgctggcagacctaaacggccacccgcttcaccaatgtgacgcacaattttcgcatcggcataaacggcgttgaagcccagaccgaagctgaagttttggttcagacgatacgcagccgccaggttcaggttagcggttttcagatcggttttaccgcctagtgagccggcgatatagtcttcattaaattcggtggctaaaccgtagttggaagtaccggatgcgccgatagcccattgttcattcagcggcataatgaagtggatgttaggaatccactcagatggcgcgatatttttagcgtcggtgctgcggcctgtcagcggagattgaccgctgatatctacgttagggtcaacgtagacaaaaccgccggagaatgaaggacggtcaaacatcgtcatagctgctgggttgcggctacctacggatgcgttgtcggcgacggcgccttcaccagagaaagaacggcccaatgcagccgctgaatattcattcagctgaaaaccggccgcagaaacgttcgaagaaataattgccactgcagctgccagagctgatcgggtaaacaggtttttctggttcatgaccaaaacctcattttaatgtgtttattatttaaactatgttacatagcgtaacaagagagcgcgggattgtagggtccgttaccaatctgacaaatcagaccagtggctgaagtataggtctgacctgtaggaatgttgcaagaatgtttttgaaattgattgaaattgattgcaaaaaatagatccacttaacaaaaaacttacatgcccatatcaataaatctatgacttattatttttgcgatgctttaactgagattttcgtcactaaataggcacataaacagtaagttctagtgatgcggggtttgcaggagtaaaatagcggcagatatcgatttttgagccagatcacaaatggcaatttgcacctatttgaaatgtcccttgaggagaattgaagatgtcagatgcaattaaacgctgtaatgcagaagaaaccgcagcctgctgctgcgtagatgtcggtactgtgatggataacaccgattgtaccgcgtcctacagcaaggtattcgccagccagagcgaagccgaagcaatgctaaacaccttgatcgaaaaagcgcgttccgtcgaatccgacccttgcctgattgagccaagaatcgagacggtagcagaaggtgttcaactcagcgttgattttacctttgcctgtgaagcagaaatgctgattttccagctgggtctgcgttaatctggccgtatttagcgcggagctttcgctccgcgctatttaatcactgaatctatttccttattattctttctcccgtctattcgttttcctctttccctatctctcttttttattctgaaagttgctcctgctcgcatttttggcctcaataggtttgccaaatgtaaacgtttggttaacaataatcggatcaggtcagacctgttaacctagcatcctaataaatgccaatttatctctcaggagcctttatgagtaagccacttccgttagtgacgcgtcagggcgaccgcattgcgattgttaacggcctgcgcaccccgtttgctaaacaagctaccgcctatcatggggttcccgctgttgatttgggtaagattgttgtcagcgagctgttggcaaaaagtggaattgcacctgagttgatcgatcaactggtatttgggcaggtggttcagatgccggaagcgccgaatattgctcgtgaaatcgtattgggcaccggcatgagcgtacacactgacgcctatagcgtctcccgagcctgtgccaccagttttcaggcggtggcgaacgtggccgaaagtcttattgcggggtcggtggggatagccatcgccggcggcgcagattcttcctccgttttacctattggcgtcagcaaagcgctggcgcgtacgctggttgacgtcaataaagcccgaactttgtcacagcgtctaaaactattcagtcgtttgaaattccgtgatttattgccggttgcacctgcagtggcggagtattccaccggtttgcgtatgggagataccgccgagcaaatggctaaaacctacggtatcagccgggaagatcaggatgcgttggcgctgcgttctcaccagctggcggcggaagcctggcaaaaaggctatttacaggatgaggtgatgaccgcttatatcccaccataccgtgcggctatcagtgaagataataatgtgcgcaaagattccaccatggcgcaatacgctaagctgcgcccggcattcgatcgcaagcacggcagcgtaacggcggcaaacagcacgccgctgactgatggtgccgcagcagttattatgatgagcgaagggcgagccaaagaattggggctgcaacctctgggctatttacgcagttttgctttttccgctatcgacgtctggcaggacatgttgttagggccgtcttatgccacgccgttggcattagatcgcgctggtatcacgctggcggatctgacgttaatcgatatgcacgaagcctttgccgcgcaaacgctcgctaacctgaaaatgtttgccagcgatagttttgctcaacaatatctggggagaagtcaggcgataggcgaggttgatatggataaattcaacgtcttgggcggttctatcgcctatggtcatccttttgcggcaaccggagcgcggatgatcacgcaaacgttgaatgagctgcgtcgtcgcggtggtggattgggcttaacgaccgcctgtgccgccggtggtctgggtgcagccatgattgtagaggtggaataatggaaaatcgcgtagaacagggcaggggagacgccacaatgccttcgaccgagtcggtgtttcagctcagtattcggccggataacatcggagtcatcaccatcaatgtccccaatgaaaaggtcaacaccttaaaggctgaatttgcagagcaaattgcccaagtgctgcaacaagcgcagtcttcgccgcaattacaggggctggtgattgtttcgggcaaaccggattcatttattgccggagccgatatcaccatgatcgccgcctgtcgcaccgcgcaggatgccagggttctggcgcaaaaaggccaggcaacgttagcgcaaattgccgcgttcccgatccccgttgtggcggctatccacggagcctgcttgggcggcggtctggagctggctctggcttgtcatggccgcgtgtgctcattggatgataaaaccgttttggggctgcctgaggtccaattagggctattgccgggttccggtggcacgcaacgattacctcgattgatcggcgcgagcaaagcgctggatatgatgctgactggccgccagattcgcgctaggcaggcgctgaaaatggggctggtggacgatgccgttccgcaggatatcttgctggaagtggccgttagccgtgccaaagctggttgggtggataagccaagtctgccgtggcaggaacgtttgctgaatgggccgctaggaaaatctatattattcaatatcgtgcggaagaaaacgttggcgaaaacccaaggccattatccggcggcagaacacattattcatgtcgttcgccaggggctggataacggcggcccgagcggctacgaagcggaagctcgggcatttggcgagctggctatgtctgcggaatcagcggcgttacgcagcttatttttcgcgacaacgtcattgaaaaaagaaagtggctcaacggcacaaccgcgcaaaattagtcgggttggcgtgttgggcggaggtttaatgggcggcggtatcgccaatgtcactgcgacccgagccggtttaccggtgcgaattaaagatattaatccgcaaggtattaatcaggcgctgaaatatacctgggacgcattgggcaaacgggtacgcagtaaacggctgcgaccaacggaacggcagcgccaaatgatgctgatttccggcactaccgattacagcggcttcgacaatgtggatatcgttgttgaagcggtgtttgaggatctggcgctgaagcagcagatggtggccgacattgaggcgcacggagcgcctcatactatttttgcctccaatacttcatctttgcctatcagccagatagccgccgaggctaaacgtccagaacaggttatcggtttgcattactttagcccggtggacaaaatgccgctggtggaagtgattcctcacgctggaaccagcgaagaaactattgcaaccacggtggccttcgcccgcaaacaggggaaaacggcaattgtggtcggcgatcgcgccggattctatgtaaaccgcattcttgctccctacattaacgaaggggcgcgctgcttgctggacggcgagccgattgagtcaatcgataaggctttggttgattttggcttcccggttgggccgctgaatttactggatgaagtcgggatcgatgtgggcaccaaaatcatgccgattctagtggaacagctcggctcgcgctttgccgctccggcttctctggacgcaattttaaaagatggccgtaaagggcgtaaaaatggccgtggtttctatctctatccggccaaaacttcgggctttaagctgaggaaaagccccgctaaacaggccgatccgaacgtttatgggctattaggcgtcacgccgaaagcgcatatacagcgcgaagttattgcccagcgctgcgtgatgatgatgctgaacgaagcggtacgctgcctggatgaaggcatcattcgtaatccgcgtgatggcgatattggcgctgttttcggcatcggttttcctcctttcttaggtgggccgttccgttatctggatcgtctgggtctggatactgcagccagaaccatgaagctactggaacagcaatacggcgagcgttttgccccctgtgagcgtctggtggcgatggcagagcagaaggcggtgttctacccggaaactgaggtgccagcggaagagtctactgcagcagaatgagtgtaaatccgaaggcattctgcgttcagaatgccttttggttagaatgtgagcgggatcaccgcctgtaactctgctgtttttacctgctgtacaggtgccagtgctcgcgttaccttagccttaatttactggctaagatttaataagcttttaagttagtagctctacattgtgtagagaataaataatggattaaactgttgagtaggctatttattaaacagtaatggttggcggtgcgttttgttggtgtaaaaacagccgttttatttacgtggagtttcaggcaaaatgcccggccgccatagagagacggcgcgttatcgtgatgaagttgctttgtcttagggcaaagttctcggcggtacagcacgcgttgcgtttctgtatagcgttattttgttaacaaaagcggtgcaatatgcaagttctaatcatgcgtcatggcgacgcggctcttgacgcagccagtgatgcacagaggcctctgacccaatgtggcagtgaagaatcacggcagatagccgcctggttaaatagccaatcggtggatattgagcagatactggtcagcccttatctgcgtgcggaacaaacccttggcgtggtaagagaagcgctgactctgcctgacgggcaggaagtgatgccggaactgacgccgggtggggatcctgcgatggtggcctgctatttgcaggctctggccaaagaaggttgcgcttcagtgctgctgatttcgcatcttccgctggtgggctatttggttgccgagctgtgtccgggtcaatgtgcgccgatgtttgcgacttccgcgatggcctgtgtcgatttagacatgaacagcggaatgggcaagttggattggcaagtgagtccctctcagctgatggccaaagtctgacggcttgtgaggatgacctgaaaacaggttagcggctgcggtgtgatacaaacttctgccttctgccttctgccttctgccttctgccttctgacccaaaaggccaaaagcacgattaaccggcatcattaataaaggcgtgaacagttttgctgtcgcgcctttatttttttggctaattcactattgggttaacttattcggctaattcgatcaaaaccagcaaggcggcggtgccaccccattctttcggagcctgatgaaacgccaatacgtccggatgctgcgctaaccacagcggtgtctgttgtttcagaacgtgcttaccgtgtccgtgcataacgcaggcgcagtgtacgtgttcgcgtttacaggctgccagcaaggcacccagctcttgtttggcctgcttttgcgtgagcccatgcagatcgagaaacatttccggtgagtaatcgccgcgtcgcagcttttttacttcaaaatgatcgactccggggcgcacatagcgtgtggggccttcgttatcgatatgcggttggaattcatcagagaagtaatagctggcatcgacctgctcttgtagcaggcgtaccggcgtaattttatgcgctttctgtggtgcctgacgatgcaggatggtgtcctgtttgagttttttggctcccgcgatcgattccctgaaaagttgcagctcctcattgctcaagtgaaatttatttttcattatttattcttagtacctaatcaattttctcagtttacctgctggatgttatctgtctaaataaatgtcgacaaagttttgcacccttttggcatattttcatcgcttgcgtatcattcacatgtgtatagctgctgatttgtcgcgggcttcatggcaaactaggcgcataaaccttgattttacgcatacctgttggagaataaattggacaaaattttcgtcgatgaagcagtgaaagaactgcacaccattcaggatatgttgcgctgggctgtcagccgttttaacgcggctaatattttttacggccacggcacggataatccgtgggacgaagccgttcaactggtctttccaactatctatcttcctattgatattcctgaagatatgcgcaacgcccgtctgacatacagcgagcgccatcgtattgttgagcgggttatccgccgggttaacgagcgcattccggtcgcttatctgaccaataaagcctggttctgcgggcaggaatattacgtagacgagcgcgttctggtgcctcgttcaccgattggtgaactgattgaaaaccgttttgaagcgctgatttcacatcagccaaaccatattctggatatgtgcaccggtagcggctgtatcgctatcgcctgcgcctacgctttcccggaagcggaagtggatgccgttgatatttcagcggatgtactggcggtgactgagcacaatattcagcagcacggcgttgaacatcaggttacgccgatccgttccgatcttttccgcgatttaccaccgattaaatacgatttgattgtgacaaatccgccgtatgtagatgaagaagatatgtccgatttgccgcaggaattccgttttgaaccggaattgggcctggcggcaggctttgacggattgacgctggcgcgccggattctggcctgcgcccctgattttcttcaggatgatggcgttctgatttgcgaagtgggtaacagcatggtgcacttgatggatcagtatcctgacgtgccctttacctggctggagttccacaacggcggtgacggtgtgtttatgctgacaaaacagcagctcattgattgtcatcaccatttcagcatgtatcgtgactaagcagtagacacgtttgtgcctgctgtaatacttgccggcgagatcgctctctgaccggcagacggattttgactcatgggtaaggagccgtgatggctgggaatagtattgggcagtttttccgcgtcaccacttttggtgaatctcacggcatcgcgttgggatgcataatcgacggtgttccgccgggtattccaatcaccgaggcggatattcagctggatctcgaccggcgtcgtccggggacttctcgttacactactcagcgccgggagccggatcaggttcgtattctgtccggggtgtttgaaggggtaactacagggaccagtattggcctgatgatcgaaaataccgatcaacgctcgcaggattacagtgcgatcaaagacgtgttccgccctggccacgccgactatacctatgagcaaaaatacggcgtgcgtgattatcgtggcggcggtcgttcatcggcgcgggaaaccgcaatgcgcgtcgccgcaggtgccatagcgaagaaatatctgcatcagaaattcggcgtgacggtgcgcggttatcttgcacaaattggtgatatcagctgcgatctgctggattgggatttggttgaacaaaacccgttcttctgtccggatgccagcaagctggagcctttggatgcgctaatgcgcgaattgaaaaaggccggtgattctatcggcgcgaaagtgacggtcgtggcggaacatgtgccggttggtttaggcgagccggtatttgatcgtctggatgccgatctggctcacgcgctgatgagcatcaacgcggtgaaaggcgtggaaataggcgacggttttgccgtagtcactaagcgtggcagcgaaaaccgcgacgaaatcactccggaaggttttcagagcaaccacgcaggcgggattctcggcggtatcagcagtggtcagccggtggttgcccacctggcgctgaaaccgacttccagcattatggtgccggggcagactatcaaccgtcagggagaagccgtggaaatggtgactcgcggtcgtcacgatccgtgcgtcggtatccgtgcggttcctattgccgaagccatgatggcgattgttttaatggaccacctgctgcgtcaacgcgcgcagtgtggcgatgttaactctgacgttccgcgctggtaactcaatgaagaaaatagggatgttgggggctgcggcctggttcgcgtcctcttcagtcatggctttgacgccgtggcaacaaatcgatcatccggttagcggtacctcgcaggccattggcggtttcgctaatggttgcgtcataggcgcgcagcctttgccgctggaatcggcaaattatcaggtaatgcgtcccgatcaacgccgttattttggtcatccggatttgctgaattttatccagcgattcagcgagcaggccaaacggcaacagttgggtttggtgttgatcggcgatatggctatgcctgccggtggacgctttagcagtggccatgccagccaccagtctggtctggatgtggatatctggctacagttgccaacccagcgctggacttcgcagcagttgctgaaacctcagccgatcgatttggtgtcctcggatggcaaacaggtagtaccgcgtttatggcagccacaggttgccagcatgataaaactggcagcgaaagacagcgaagtcacgcggattttcgtcaatccggcgattaagcagcagttatgtatcagtgccggaagtgatcgtgattggttgcataaagtccggccttggttcggccatcgggcgcatatgcacgtgcgtttgcgttgcccggcggacagtttggaatgcgaagatcaggattcaccgccagcgggtgatggctgtggtgccgagctgcaaagctggttccagcctcatcagccaagcgccaaaccgggtaaaactacgccgccaccattaccgccatcctgtcaggcgttgctggataaccacttcgcagggagatagtcattggattggttcactcttggccctgaggttctcggggtcttgtttttagtggcgctgctggcgggatttattgattccatcgccggcggcggcgggctattaaccattccggcgctattggcggtaggcgtgcctccgacccaagcgttggccacgaataaactccagtctgtgggcggttctttctcggccagcctgtattttattcgccgtggagcggttaatctcaaagagcaaaggctgactattgccctgactttggccggttcaatgctaggggcgattctggttcagcatatgcaggccgatatcttgcgacagattctccctctgctggtcatcggcatcggggtgtatttcctgctgacgccgagattgggagagttggatcgacaacgtcgactgtcagcgctgcctttcgcattaatcgccggtggtggcataggtttttacgatggtttctttggccccggcgccggctccttctatgcgttggcgtttgtcactttatgcggttttaatctggctaagtctactgctcacgccaaggtactgaacttcacctcgaatttaggtggtctaaccttctttattctcggtggaaaagtgttatggggcatcggcttggtgatgctggttgggcaggtgctgggcgcgcgtttgggcgcacatatggtgctaactcgtggtcagaaacttatccggccgatgatcgttgttgtgtctttggtgatgagttgcaagctactctatgataatcacggctcagaaattcaggcgtggctggcattgcagggcatcggctaatgctcgcttgttacgcggcttaatgggataatccctctttttccataagggcattattgctcactgtattgcctctgatgccaacttggcggaggcgtaatttgcggcttaccgggtatacacagcgtaatcatgtcagaaagtttatcgactcaaaaccatactcatcactatcaagaacttatcgatattttcaatcgctgtttcagcgaagaattcaacacgcggctggtgaaaggcgatgacgagcctatttatctgccggctgatgatcaggtggattacaatcgcattgtgttcgcccacggttactatgccagcggtatgcatgaaatttctcattggtgcattgccggcgaagaacggcgcaagcgggtagattttggttactggtactgcccggacgggcgcgatgcgctcacccaaagccagtttgaggcggtagaaatcaaaccgcaggcgctagaatggatgttttgcgtcgctgcgggtttccctttcaacgtgagttgcgacaatctggaaggtgactgcgagcccgatcgccttgcttttcaacgtaaagttcgtgaacaggtgctgcggaatttggaacagggaatatccccacgacctgcgggctttattcgggcgttgcaatcgttttacaatacgcccccgctggcggcggaacacttcccttatccggaagatttcgactgattgccagactgaccagaaagtttattgaggaagagtaatgatcgcagaatttgaatcgcgcattttggcgcagattgatgacatggtagagcacgccagcgatgatgacctgtttgcgggcggctacctgcgcggtcacctaacattagcagtggcagaatcggaagagcacggcgagcattctgccgagcagttacacgctcgcgttcagcacagtctggataaagccatcaaagctggcgaattatcgccgccggatcaggttttggtgttgggtctgtgggatcgcctattagcaaacgcgcagatttctcactagttttatcgctgccgtgacgctttaaggcatcatggcagctgcctttcattcagggcgcggtggattttgtaccggtctgcctttcagcagttttctaatccaaaaacgattcgggtttaatgcggacagcgttgaattattcagcggcaacggctcgccgaacatttgaccagccagaatctctgctatcagcggcgcactgcataatccgcgcgaccctaaagctccagccataaacaaatccggatataccggcgcggcttcgatcggatcgccgtttttgatctgctgttgtaacctctggtattgagtcagcgtggcctgatagtccggcactgcacccaccatcggtaaatggtcgcgaatggcgcagcgcacgccacagcgcgcctgattatctgaaacattcacctgctgtacccaatccacctgcggtaaacaacgcatcagacgatcgcgattttcttgttgctcagaggcactgaaaagggtggaggtttcaccgcgctgataactggctccgatacaatgctgctgattattcggattaaccggtgtcatataaccgtcgtagcagagtacgtttttcaatttgctgagggttggcgtggtgggaatatgggaaacctgaccacgtaccgccgtcagcggtaagaaacgagtttgttcccactggggtaagcgatggccggccgccagaatcaccgtgtgatgacgggtatctggctgattggcaaaagtcagctgccagcgattttctacccgcgtcagctcggtgacttcatgctgatagtggcagttcatgccttgttgttgtgccagagccatcagcgccgtggtcagttctgaagggcaaagccagccgccgtttggataatgaatgccgtcatgcccactgttcacacccgctcgctcagttagctgggcatggctcatggattcagcaaattctttcggccattgcgtgcctaaaatcttatcgattttgctacggcttttttcatcgtaagccagctggcttacgccgcaccactgatggtcgaaggccatgccttgttcgatcaatgcatcgtactggcggcgggcaaaggtaaaggcgctggtgtaaaaatcctctaacgcatcgccttttccgttcagtaacggataaatcgccccctgacgattgccggaagctccttgcgccggtttttcatcggcgcagtacaggctgacgttggctccgcgtcgcagcaaagaaagcgcggttagggcgctgacaatgccgccgccgataatggcgatatcctgaatgtcgctggcgaccgggcgggcataccaaggcgcaggatgtggattcatgtgattttccggcaaaaccccggtcagcatttcccttttttgcccaaaacctttgactttagcaacctcaaaaccggcctgcagcaagcctctacgcacgaagcctgcggcggtaaaggtcgcgaaagtcccccttgggcgagcgagtcgcgccatggcgctgaacagcaattcgttccacatatccgggtttttggaaggcgcgaagccgtccaggaaccaggcatcaacctgattatccatgctggcgtctaactgaggcagcagcgtattcacgtccccgaaccataaatccagcgtaatacgaccctgatccaacaaaatacggtgacaacccgccaggggcattggccactgggcgcgtagctgttcggaaaaagcagccaactcaggccagcggctgtgggcgacggcgagatctttcaggtttaacggatatttttcgaagcttatatagtgcaggtgctgaagcgatgcatcaggttgttgctgacgaaactgcgcgaaactttgccacagtgttaaaaagtttaggccagtgccaaaaccggtttccgcgaccacgcagcgagtggacgaatgctcgataaaacgctgtggaaaaccgtttcccttgagaaaaacaaaacgggtttcttccagcccatcctgatttgaaaagtagacgtcatcaaactgttccgaaacaggtgtaccctgatcgttccagctgagtgtggcggtttggatgggggtgttattcacgtaagaagactcgtatctcaaggggtagagggattttaacgaggtgttaccttgggtgcaaatcggaagataatctggtgatattacgctgatcggacttgttcggcgtacaactgtacgctaaagtgcattgcaaaatcccgaaagctaaaagtggaagaggtattaaatgaagcgtgcagtgattactggcctgggtatcgtctccagcattggtaacaatcagcaggaggtcctggcatctctgcaggaaggtcgttctggtattactttcgctcaggaatttaaagacgcaggtatgcgcagccatgtttggggcgatgtaaaactccagtctgagccgaaagatctgatcgatcgcaaggtgctgcgttttatgagcgacgcctcgatctacgcttatttggctatgcaggaagcaatttcagactctggtctgaccgaagagcaggtttctaacttccgcagcggcttggtagtcggttctggcggtggttcgccacgtaaccaggttgctggttccgatgccatgcgtactccgcgcggcctgaaaggcgttggcccgtacatggtgaccaaagctatggcatccggcgtttccgcatgtctggctacgccgttcaaaatcaagggcgttaactactctatcagctccgcctgtgccacctctgctcactgtatcggtcatgcggttgaactgattcagctcggcaagcaggacgtagtttttgctggcggcggcgaagagctgtgctgggaaatggcctgtgagtttgatgcgatgggcgccctgtccaccaagtacaacgaaacgccagaaaaagcgtctcgtacctacgataaagaccgtgacggtttcgttatcgcaggcggcggcggtatggtcgtagttgaagaactcgagcatgcattagcccgtggcgcacatatctatgctgaaatcgtcggttacggcgcaacttcagatggcgcagacatggttgctccatcaggcgaaggcgcggtgcgttgtatgcaaatggcgatgcagggcgttgatactcctattgattatatgaacgtgcacggtacttctacgccagttggcgatgtgaaagaactgggcgcaattcgtgaagtcttcggtgacaatacaccggcaatctcttctaccaaagcgatgaccggtcactctctgggggctgcaggcgttcatgaggctatctttagcttgctgatggttgagcacggttttattgcgccgagcatcaacatcgaaaatctggacgagaaagccgaagggatgaacatcatcactgagccaaccaaacgtgaactgacgacggttatgtccaacagcttcggttttggtggtactaacgccactctggtgatgcgtaaataccagaaataagccgtcccgagacttattacgccatcatttttacaatgattaaaattgaatcccgaactgattgcagttcgggattttttttatctctttatctctttatctctttggttattttcttaatccatatctatagttattgaggctttagatcgggaatgtcttttcattctaattatttgcattacggataatggaataagccgccgctgatgttacaacgtgccatcaagaccttgtacgttgctatcgggcttttttagcgataagcgccgtattcacattcctgccgtaggcttaactgcaaggatgtatccggtgaaaacccccgctgatttgccgctaatgaaactcgatgctcaacaagggaattaagatctaatcagtatttcttgggtcaggctctggttaaaattgcggcgcttgaagggattcattttatttcgttatcacaacgcgattcgcggtttttcgtcttaaagcgagaagcttaggttttatagagctcaaacgaacgggtgcattacaatgaaatatctgtttttattgatatttatactttgcgtgctttacattcattaccgcggacgagctcgctatcctttttggcgacagctttctgatcactccacctttgtggcaccgctcaatgtgtttatgtaccttttttctaaagtaccgaacacgccatatttaaaacccgaaacctttcccgaattacagcagttacaggccaactggcaaaagattcgcgaagaaggtgaatccttgatggcgatacagcagattaaggcttcggataaatataatgatgccggttttaactcgttctttaaaaccggctggaaacgtttttatttaaaatggtatgaggataatcatccttcggcgatgagtctgtgtccgtttacgacggaactactgcgtggattaccttcggtgaaagcagccatgtttgcggaattacctgatggcagccgtttgcctcgccaccgcgatccctatgctggttctttgcgctatcaccttggtttgattacgcccaacgacgaccgctgttttattgaagtggacggcgaaccctatagctggcgggatggggaaggggtattgttcgacgaaacctatctgcattttgccgagaataaaagcggcaagaaccggctgattttattttgtgatatagagcggccgatgcgttatcgctgggcgcagcgggttaatcattggtttggtcggaatttaatgagtgcggcaaccgcgccaaacagtgatgaagatcgtactggtggggtgaatcggttatttaaatatatttacgcgatacgtaaagtgggtaaacgattaaaagcctggaatcgacgagtttactatctgattaaatgggtattatttggtggtatcgcaggattgattttcttctctttataactgattttcgtgatgatagaccaataaagtaaaactaagctggggcaatcagttgccccatcgctattatcttttgcttttagggatcttcgcggccagttattagcttaacgcatatttagcggcggtttgagcatgaatggcggtggtatcaaataccggtactgaggcatcttcagcgtttaccagcagagtgatctcagtacagcccaaaataatacccttggcgccttgttgttccagtttggtaataatccggcggtattctgctctggatgtttcgttgatttcacctaaacaaagttcctgataaataatccgattgacgatttcccgatccgcatcgtcaggcaccacgacctcgatattatgcctttcggttaagcgcccacggtaaaaatcctgttccatcgtatagcgggtacccagtaacccaatttttttcaacccctgttgcttaatctgcgccgcagtagcgtcggcaatgtgcaataacggcaagccgctggccgcctcaatctcatctgccactttgtgcatggtattggtacataccacgatagtttcggcaccggctttttttaaagccactgcagcattagccagcaggcgagccgctgcctgccaatcgccagatgattgcatttgctcaacttcatgaaaatctacgctataaagcacgatttttgccgaatgaagaccacctagatgttgcttaacatattgattaatcatccggtaataaggaatagtggattcccaactcattcccccgatcagaccaagagttttcatctattttcctgccagtagtaaaagtgaagccgttgccagccagatcgaatttatcttttgataaagtcgggcgtaataaaaccaggtggacagatagcgcggagcaattcgtaaaactgtgattaggctccacctttgccgcaagtgccgaactatgatggtcgttgtaatatttatatataaataaatagcattatcaaaactatataaattaaacctcggagcctgggatgataaaagtgaaaaccgccgcatcgttaactttgcttgccctgttattacctgctgcagaagtggccttagcgcaggatcggggcaataatgttcggtctgaacaaaacggttatcagttggagcaggtattggtaatgagccgccacggtattcgtgcgccgttggttaactatggtgatattttgtctagcgcgacgccatttcaatggccgaaatgggaaacgcccggaggattgttaacgccaaaaggcgcggaagttgaggctattttcggcggttacttccgcgagtggctggtgcaaaataaattactgacagcgcagggttgcccaggagacggcaaggtatttacctacgccaatagtttgccacgtactatagatacggctcagcatttcctatttggggcttttcccggctgtaatgtaccggtgcatcaccaaaaagacattggcaaaatggatccggtatttaatcccataattaccttggatgtgacgcccgaatttaaagctcaggcattagcatcaattaatcagcacgctggccccggtggtatagcaggactcaatcagcgtttgcagccaaattatcaaatactgtcgcggatattggattttaaaaactcgccgtcctgtttgcaggataaaaaatgtgattggagcgagcaacccaacgtaatttcactggtgcaaaacaaggaaccgggaatgaccgggccgttgaagttgggtaccggcgcgtctgacgcctttatgctgcaatactatgagggtttcccgctaaaagacgtggcttgggggcgaattgcttcgccggaagagtggaagcaattgcaggaaataaaaaatcgatatcatgaaaccttatttggttcaccggcaatagcggataacgccgccgagaaactggttaattttattcatgctgctttagatccggtgggagagaaaacgccaaatgagcaactggcgcagcaagctaaattagcggtgctagtagggcatgattctaatattgcctctttgctagccgccataaaaaccaaagactatcaattacctaatcagtatgagaaaacgccgatcagcggaaaagtagtatttgaacgctggaaagacacaaaaaataataaagatctgatgaagattgaatatatctatctttcaaccgaacagattcgcaataaaacgccgctgagtttgcaagcgccgcctgagcgcgtcacgttggaaattgaaggctgcccaattgatgcccaaggtttttgctctatggacgatttccgacaggcaatgaaggaaaatactcatatctaaacgactattcgcggcaggagagtaactcctgccgtattttactgctccggctctctcggttaagctgaggctaatctcctctcaatggtcaacgctttctatgactggatcaatttctctgcgtaccggcctgaatactttatttaaaccttttttacgcgatcgtctgctgcatattttactgctggtggggattggactgagtctctggatgccagagaaaattcacgctttccctgattatatcgattggaccaccatcattaccttgctgggacttatgctgttgaccaagggcgtagaggtgagcggttattttgattttattggccgtaagataattaataaactccacactgaacggcatatggcgctgtttttggtattatcagcggctttgctttcctcatttctcaccaatgatgtcgctctgtttatcgtggtgccgctgattctgaccttaaaaaaaatgtcatcgctgccggttagtcggttaattattttttcagccattgcggtcaatgctggttcgttgctgacgccgattggaaatccacaaaatatcctgctgtggagtcaatctgagctgtcatttttaacctttacgcagcaaatgctgcctttagctgcggcaatgttaatgacgttatttgggctgacttggctgtttttccccgctcgtcaaatcagtaagcgtcgtgatactccagaatatccgtatcaatcgggtttattactgagttgtctggtgctgtatattttgtttgtggttagcgtcgatttaggctggggtctttatgggttaatggcggtatcaatcgggctattactgctggccagacgggtattgttttatatcgactggagcctgatttttgtgtttatggccatgtttatcgatattcgactattgacggaattaccggcgctgcaaagcctgtttggtggtatcagtacattgccaccatcgggtatttatctgcttggaatcggttcttcgcagatcataagcaatgtgcccgcgacgatcctgttattaaattacgtgccttccagtgctttgctggcttatgcggtcaatattggcggcttcggattagcaattggttccatggcaaatcttattgccttaagaatggccaaagagcctagtatctggctgaagtttcacgcattttcactgccgttattactatggggagcgctggtgggctgggtgttgctgtagctgactcaggggtaatcctgagccaaccaatcatcagataaacagtataaataatacgacgaaggcgataatcaaagcgataaaggccaacgagggctttttcagcagtggttgcaacggagcaggcagtgcggcgataaacggattgtaaatcggctgaatcgggccttgttcgtcgctgcgctgtatcgttattgcgcgatccaagcggttggaaaatagcacgttaatgacatcgttaagctgagcctgagtcaacggcgtggttgggctggcctgaaaacgatgctgagcataatcggttaacagtttctgctcagtgctatctaccggctgtttcaatgcggcttgcaggcttactagcgttggcgcggcctgctgactgagggcgactttggtctgtaagaactggctcataagctgaaaatgacgagcgggaagcggatcggtatgcttaataccaatcatctcaaatagcccttgccagattttagctggctgttcaccggttgcagcgctgagtttggtgaccagcgattgcaggctttggtgctcggcgggtaatagcgggcgatcggttacggcggcaagctgcggctgcgggatggtcagcgtaccggattgcagtagtacgaagacttgctgtaattgctgatggcttagctggctgagcaccgtatggccaaagttctgccgaataaagtcgctgactgcctgacggttattcccttgaggtagtagttcggtcaactgttggcgtaactggtgattagcgtgattttcctgcgcctgacccaaacgggtttgcagcaactgttccgccggctgaaaatgtcgtgccagcagctctgcggtattagttaatgataaatcgtggcgtagggtagcccatatttccgccgactttaccggcgtgagcgccataattcgtacgatcagcttttccagcgtagtacgctgagccggagttaacgcctgatcgtcaccgctgttcaacgggctggttttgttcggcacagcggttgtggtgcgatcgctggctataggggcgccggagccgtttaaaggttgcatttcacccgtccttcgctaggaataaaatcatggttacccggcgattggcgcaggctggggctataatacctgtaaatttgtccaatcaatacagtccggcttgggttttattagatgaatgtttatgttgtgggcattgataatcttaattatgtcgctaagatgagtacacaacgaaaaatagggcttaaatggttcatcaacaacgcattgcaaaatggttcctctgtctggcttgtctggtcgtactagtatgtatgactcagcgcatggctagcatgcacgcgttagaacaaaatttcggcctgacttccctgagccagacggttgacgacgagcaaacgtcacaggcaccttgtgagctaagtgctaaatctctcttggccgcgccaacggtgctgtttgagctgacgtattttgctttgggattattgttactgttattggttccaatctctccgtgcgtgatgcggtttccgccgcggcgcgccatttcacccagtcgattaagggtgcacctccgattttgcattttccgggaatagcgactccgccagttgatttggtgtgattaatctatttttggagaaaagtaatgcgcaatattttcaagacagccttgttctgtctttcgctgctatggctgcccagtctgtgggctgcggatagcggttggctcatcagtccgctcaatgaccatgccaaggtacggctgcgcgctgaacctaccgccgaaggcgatacgcgcctattgctgtcggtcgcgttggaaaagggttggaaaacctattggcgttcgccgggcgaaggcggtattgcaccgtcgatacgttgggatcatgcgccagcccaagtgacatggcactggccaacgccgcaacgctttgatgtatcaggaatctctacgcaaggctatcaacagcatgtctccttgccgatagtgatttcgggtacgtcggattcagtgctatcgggaacgctgaccctatcaacctgtagcaacgtctgtattttgacggattatcctttccgtttggatctgagtaaaaccggctccaatccgcgttttgactacgatttcgcgcaagccttagggcaggtgccgataaccagcggtctggtcgatgagatttccgccggttatggtaacggtgaagtgcagattttagctcagcgccgtgcgggttggcagcagccagaactgttctttgacactctcgatgatgctgatttgggcaaaccggtgattgccatttctggtgagcaactggtggttcgggttccggctagcgatggctggggtgacagcgcgccggatctgcgtgggaaaaatctaacgctggtgatcagcgacggcggcgtggcgcaggaagccaccgttaaactggggaatagcgtttcgctgcctaataccgccaccgcctattggcagtggattttgatggcgttggccggcgggttgattctgaacctgatgccttgcgtactcccggtactggcgatgaagttaggctcggttttgcaggttgaaaaccaaagccgcggtagcgtgcgattgcagtttatttcctcgtcgatgggaattcttttctcgttctggctattggcgttgctgatgaccgcgctacgtcttggcaaccacgccctcggctgggggattcagttccaaagcccgtggtttatcggctttatggtgctggtgacggcgttattcagcgctaatctgtttggtctgtttgaagtgcgactttcttcctcggcgacgacccgcattgcgactcagggtggcaacggcttgggtgggcatttctggcaaggcgcattggcgacactgctggcgacgccttgctccgcgcctttcctcggcacggccgtggcttttgcgctcgccgctccgcttccggcactttggggcatttttactgcgctcggggttggaatgagtctgccttggttgttgatcgccgcctggccgaagttggcgttgtgcctgccgcgccctggccgctggatgaaccatctgcgggggatattgggactgttaatgctggcgtcctgtttgtggttaatcagcctgttgagcagccatatcggcatcctgtggaccgggattattgccggtattttcctgttggctttgttgctggctattgggcgtcattatggtgtgcgtattgccgctattgtcagtctaatcagcctgttagtgattggcgtggcgttgctggtcggcgcgttaaccgcggatctgtggcgtaaaccgctgcacgatcgtgtgccatggcaaccgctcagtgaaactgcgattcagcaggcgctgaaggaaaacaagcgggttttcgtcgacgtgaccgctgactggtgtgtgacctgcaaagtcaataaaatcaacgtattgatgcgcgatgacgtgcaaaaggctctgatggaggatgacgtagtcgctctacgcggtgactggacgcgcccttcgccagagatgacggcgttcttacgtaaacgcggcagcgttgccgtgcctttcaatcaaatctacggcccaaatagcccgcagggcgtggtgctgtcccctctgctaagccgtgaatctctgctagacgttttagccaccgctaaaggaaataaatcatgaaaatcgtcactctgttggtactttccctgataactgcgccggtattcgcggcaccttttactccagagcaagagctgcgtattaaagaattgatcggagaaactctgatttctaatccggaaattctggaaaaatcggttaatgcgtggcagcaaaaggctaacgatgagcaaggtaagcaactgagcgccttgattaaagccaatgaaaaagatctgtatcaggacccagctagcccgcgtttgggagcggaaaatccgaagttaacgctagtttcctttaccgattacaactgtccgtattgcaaaaccttcgatccactgttggaaaagatcgttaaaacctatcctcaggtggctttagtgatcaagccgttgccatttaaaggcgaaagttcagtacgcagcgcccaggtggctctgacgctgtggcaacagcatccggagcaatttttaccgtttcatcagcgtttgatggcgaaaaaaggtttccatgatgcagcgagcatcgctgctgccgagaaaaaaaccggcgtagttgcggtggaacccacggagcagagcctgaacgtattgcggactaacctgcgtctggccgatcaactgggtattcaagggactcccgccacgttaatcggcgaccaaatggtgccaggggcaatatcctatgatcaactagaagaaattgttaaagcgcaactggcgcaggcggaaaaatgagccgactgaaacgttggagccgtgagctgctaatcctgctggcggtggtgctggcgttgaccgttgctatggattggctgcgcagcccgcaggcgccgccgagctgggcggaggaatcactggtcactctggatgggcagccggtgtctctgaaagcgctgagtgaggaaaaaccgctgttggtatatttctgggccagctggtgtggcgtatgtaaatttactacgcctagcgtgaacaccctggctgctcaaggggaaaatgtgatgaccgtagcgctgcgctccggagataaccagcaggtagaaaagtggctggcaaagaaaggtcagcgtttgccggtggtaaacgatccttcggggcaactctctgcccaatggcagataggggttactccgaccatcgcaattttatatcgcggagaaatggtcagcagcaccagcggctggaccagtttgtggggtatgaaactgcggttgtggtgggccagtttctgattaaattaagatagtaaaaatccgatagtacattggactgcatcttattcagttggatatccactgagtaaggtgcagttttttatccaatactggcgtagcctgaatagactttggtaaccgccattaattaacagccccccattcagccaattttgtattccatgcggtatattctggtgaggggagtttgaagaaaccaatggaatatctttcaggcgtagcctgaagcaatagggtacacaccagatcctgaagccaggtcgtattttccacattttcaaatttctgtatatctttaagcttatttattgattcatatacataaatcaatgaatctcttatgttttgatatttctcattctgagcagcgtgtttgttagggaaaataaaacttgcgactttccaccaaaaacttttaggggaattatgtatttttaagttgtttactgcatctctgatgattggttgcaatcctgttttactgctcagtaatagtggtggctggttttttaattctagcaatgctactgaatcagcatcgaatttgctgaagtgagcgttagtatactcgtcaatggttttttttgtttttttctagtgtttggtaatcaccttcaagcatatctgctttagaaagggctaatgtatggttgattgtgttggtgttttttatatctgattggtaattgccattaagccttatgtttaataaggttttaaaaattttactgatttgagaacatgttaagtataatttataactattctcaatatcacttttcaatttttcaatgtcagcttgagttggcacaaattctttaataattaactgcggttcttcaatggttgatattggtaacggatgcttacgtacttctattttaatatttccacccagaagtctattaaacgctttagctattctggtaattttgaatattctgttcagtgcgccattttggtttaagatatcatctaatttattagagagagttccactaccgtgaccttttaatatttgttgaattagttcggctattttttccggttctgtcggtaaatgccttactctgactatgtttttccctgaaatctcaggtagctctatatatttatgaatatctttattttcattattaatttcgcttaacagataaccgatatgtaattcttgatttttaggggtgtcaatatactcttgcaaccagtttctaatgtcgtttcctatagcactgatggttgcatcatcaagtttttcgtttatttttattcttgttggcaacgcgtcatctattgatgaagttgatggttgttcaattctgtgttttttggccaatgcatggtagttatgaattgacttactcatattcccaagcttgtttttctttgatgtattaaatacattgattgattttataaatatactgtctttgttcttgttttgattcttttgggttttacttaacaaggaaggtgtagatgtttgattgattttttggagctttgaaccaaatccactacgcacttcatcggagagaggctttaataccagttgtgtactattcgttaagtttgtcacttttggcatagtaatcatctcatatttattagtggagatgatattattgctaaacattattaacaacgctttcaagaagtgattattttattagataattaactagtatattagatgtctatgttcagggttgagagtgaaaataatagtattgcagagaatttcatttgctgacatttcgctaatgcggaacagttttcatttattggtattgcgaatgaaaatatgccgtcccagccagaacaaaaatcgctccaggctggaaggcatgcaccggtttttcaatcagctagcttttattcgtttgctgattggtggttgattcaaccttgatttcaataattggcgctggggttttacgtagtggaatccgcagacgttgcgccagaatgacaccggccagtgtaattcccccgccaatcaggtgatagctgtgtaattgttcgtgcaggaagcttacggcaataatggcggtgaataccggagtcagattcataaaaatcgatgcggtattggcacctaaacgcatcacgccgtgaatccacaggtaaggcgcgataattgacgcagggataccagcaaatagcaccaacggaatattttgcgcggtaagctgcacatcgcttgccagcaggaaattagggattaacaacagcacaccaaacacaatctgcatgtacagagattgccagttaggtagctgaatattccagcgtttggtgagtacgccgtacagagcgtaagaggtagaggccgccagcatcatcgcctcaccttgaccaataccgtgctgtagcaactgcgccggatcgccagcgctcaccagccacaccagtccacccagcgataaaatactgcctaaagcgatgcctactgtgggagcaacccgcagtacgacaatactgattaatacggttaacaacggaataagcgagctgagaatccccataaacagggcgctaacgctgtgtgccgcataataagccaggctttgatacaacaccattcccagtaggcccagaatgaacagtttccaccagtaaaccttaatcgccggccagttgcgaatcacgcccatgagtaaaaaaggggtaagggtgataaacgccagtaaccagcgatagaaagagattgccgctgggtcgatagccgtggcagagattttactgaccacggcattgaccgaccaaatgatcaccgcgaacagagggaaaagcacattcatgataactattctcatttaaactaacttgtacgctagtctactcctgtctgatttattatatatactgataatcggacaagattcagcgcaattaagacatttgctcggtagcgaacgccttagccacaacaatctgattaaccatggtgtctcaatgatggcttcttccttgctacccaaggcgctggctgcgccacctaaaaccctgttgctccgttgtgaggaactcaatgctgatacggagtttttgccgcattctcatcaatatgggcagttaatttgcgtcaaatctggcgtcgttgccatgagcgtcggtgggcagcgcttccttgctccgccagagttcagcctatggatacctagcggaatggagcactctagctataatcggcggccaacccaatatcgggccatagatattgcgttggatttatgcaaagagctgccggattctccctgtctgattaactttagcccgatcattaatgtcattctggaagattgctttacgcgcgggatgtctgcgccgcagacgccgcaggatcaccgtttggtgcaggtgttgatcgaccaactgaaaatatcaccgatacaacgcacttatttgcccacctcgcaggataaactgctggcacccattctatccgcgttggagcgctgtccgtcagacaatacgtcgttatctcaatgggctaaacgggtttacagcaccgagcgcacgttatctcgccgctgccagagggaattaggcatgccttttagcgagtggcggcaaagactgaggtttttacatgctatttctctattagaacaaggaaaaaccgtaaatagcgtggcgttggaagtgggatacagctcggcgtcggcctttattgttatgttccagcaaatttcaggcaccacgccggagcgttatcggcgcggacaatagattttccgaagaaagcctcagttataacgttgggttcgagttcattcagtggcaaaatagcgcccatctttttcatcggtatggcagcgcgctgtcggagagcaaagtgaaaattctggttgatgaaaatatgccttacgccaaggacctgttccagcgtttaggtgaagtgcaggcggtgccggggcgaccaattccccttgaggctttgacccacgcggacgcgctgatggtgcgctctgtcactaaagtcaacgcggaattgttagaaggcactggcatcggttttgttggcaccgctaccgcgggcacggatcatgtggatgaggtctggctacgtcagcaggggatcggtttttcggcggctcccggctgtaatgctctcgcggtggtggaatacgttttttctgccctgatgatgatggcggagcgcgatggattccatctgcgtgataaaaccgtcggaattattggtgtaggtaatgtgggggcgcggcttaatgcgcgcttgcaagccttaggcgttcggacgttattgtgcgatcccccgcgtgcggatcggggggattcagaagaattctggccgttggaaaaactggtgcgggaagcggatgtgctgactttccatacgccgttaaacaaaagtggcccttatcaaagcctgcacatggcggaggccgagctgctggccgcactgccggataaccgtattctgatcaatgcctgtcgtggtgctgtcgtcgataacgcggcgctgctgaaggcgttggaaaaaggtaaaaaactcagcgtggtattggacgtgtgggaacctgagccagagctatcgctgccactattggcgcgggtggatattggcacgccacatatcgccggttatacgctggaaggcaaggcgcgcggcaccacgcaggtatttgaagctttcagccggcatattggtcagccgcaatcggtggaattgtcctcattgttacctcagccggaatttagccatattcggttaaatggcgggttggatgaaggcaaattaaagcgattaatgcacttggtgtatgatgtgcgccgcgatgatgcgccgttgcgacaggttgccggtattaaaggcgaatttgatcggctgcgtaagcattatcaagaacgtcgtgaatggtcatcgttgtgcgtacagtgcgacgatgaggccagcgcagaattactgcaaaaactgggcttcacgactcagcttttgtaggcatttcagtttgtcagcgagttaaacgctgcaaatgacctgaatttagattatcaaggcggtattgaccgcctctttgtatttgaacgaattattgtggagaaaaccaacatgtctgacggctggaatattgctctgttaggagcgacgggcgcagtaggtgaagctttactggagctgttacaagagcgccagttcccggttggtgaattgtatcctctggccagcgagcgtagcgccggagccacggtgcgtttcaatggcaaaagcctgctggtggaaaatgtggcagagtttgactggtcgcaggcccagttggccttctttgtggcaggcagcgaagcctctgcgctgtatgcggaggacgccggtaactccggttgtctggtgattgatagcagcggcctgttcgccatggaacccgacgttccgctggtggtgccaagcgtcaatccgcaggttctggccgattatcgtaaccgtaatatcgtagcggtagccgatagcctcactagccagttactgacggcaatcaaaccgctgaccgagcaggccggtttgtcccgtttacacgttaccagcctgatttcggcttctgctcacggcaaagccgccgtggatgatttagccggtcaaagtgccaaattgctgaacggtattccggctgaagctgctatcttcccgaaacagctggcgtttaacgtcttgccactgctggcggacgaagagggcagcgtgcgtgaagagcgccgcttggtcgatcaggtgcgcaaagtgctgcaagacgaaggcctgccgatttccgtcagttgcattcagtcgccggttttctacggtcatgcacaagtggttcatttggaagccttgcgtcctatcgcttctgatgaagctcgcagtgaactggaaagctgtgaagatattcagttgacggaagaagatgatttcccaacgcaggttagcgatgcttctggcagcaactatctgagtattggttgtgtgcgtaacgattacggtattcctgagattctgcaattctggtccgttgccgacaatattcgcttcggcggcgcgctgatggcaatcgaaaccgcagagcgcctgttgcaggagcaactgtactaatgtctgagcttgaattatccccgcagccggagcaggcggcgggtctgaagatcgcgctgggcattgaatacaacggcagccgctactttggctggcagcgtcagcaagaagtggccagcgtgcaggcctgtctggaagcggcgttgacccgagtggccaacgagcctatcaccgtgcagtgcgccggtcgtactgacgcaggcgtgcatgcaaccggtcaggtagtacattttgtcacctcagcggtgcgaaaagatgcggcctggaccatgggcgtcaatacccatttgccaccggatatcgcggtgcgctgggtaaaaaccgtcagtgaagatttccacgcgcgtttcagcgctaccgcgcgtcgctatcgttatgtgatttataaccatcgctatcgtccggctattttggcgcagggcgtgacccactgctatatgccgttggatgcggaaaaaatggcgcgcgcggcgcaggcgctgttgggggaaaacgattttacctcgttcagagcggtgcaatgccagtcccgcacgccgtggcgaaatgtaaaacatgtaaaagtttcccgacagggcgcttatatcgtggtagatatcaaggccaacgcatttgttcatcatatggtgcgaaatatcgttggcagcttgattgaggttggatgcggtaatcaagacgaaaactggattgcggagctattggcgctgaaagatcgaaccaaagcggcggcaacggcgaaggccgaagggttatatttagtggcggtagattatccggaacattttgatttacctcaggtacctatggggccgttgtttttggctgacgatgagttcttagctgtgaaaagcttttagctaagcatggtttttagctgagaataacttttggctaagaaagactttgggttgagaatagtgtccgggcgactagtcaatatatttagagcaactcatctacctgattcaggtgggcggcggtgcgctcgctaattgagagtgtttatggaattcatacggttcgttattgattttattctgcatattgatgtccatctggcagagttggtagcgcagtacggtatttgggtttatggcatcctgtttctgattttattctgtgaaaccggtctggttgtgacgccgttcctaccaggggattccctgctgttcgtcgctggcacgctggctgcattgccaaccaacgatctcaatgtacataccatggtggttttaatggtgatcgccgcaattatcggtgatgcggttaactacactattggccgcgtatttggtgaaaagctgttcagcaatcctgattcgaaaatattccgacgcgcctatctggataaaactcaccagttttatgagaaacatggcgggaaagcgattattttggctcgatttgttcctatcgtgcgcacatttgcgccgtttgtcgccggtatgggtaaaatgtcctatcgtcactttgcggcgtataacgtgataggggcgttggtatgggtgttattattcacctatgctggttatattttcggaaacgtgccttttgtgcagaacaatctgaaattactgatagtagtgattattgttgtttccattttgccgggtgttattgaggtttggcggcatcgccgcgcggctacccgccagaaaaataagtaaaaatgttgcagtaaccaagggttcgaccagttttttatccacagtgtcgggccaatatggtttaatgtgtaacattaatggtctgttcctgcggacactccgagaacctgtgcctaatcacgcttcgttggcgtggtgtttgggcactttttgttggcagtgttttcagggagatggttacagcatgaacagcggactggcatcggccaggttcaaacagaaaggtcatcgatgagctggattgaacgaattcttaacaaaagcaacatcacgcaaacccgtaaagcgagtatacctgaaggggtgtggacaaaatgcgatagctgtgggcaggttctgtaccgcgccgagctagagcgtaatctggaagtttgtcctaagtgtgatcaccacatgcgtatgtcggcgcgtcagcgtttacatacattgttggatgcaggcagtgaagttgaactgggcagcgaactggagccgaaggatatcctgaagtttaaggattccaaaaagtataaagatcgcctttctgcagcgcagaaagaaaccggtgaaaaagacgcattggtcgcaatgaaaggcactttgtacggtatgcctatcgttgcggcttcctttgaattcgcttttatgggcggttcaatggcttccgtagtgggcgcacgttttgtccgcgcggtagaacaggcattggaagacaattgccctttggtctgcttctcctccagcggcggcgcccgtatgcaggaagcgttgatgtcattgatgcagatggcaaaaaccagtgcggcgttggcaaaaatgcaagagcgcggcttgccttacatttctgttctgaccgatccgaccatggggggcgtttccgccagcctggcgatgctgggtgatattaatatagccgagccaaaagcgctgatcggctttgccggcccgcgtgttatcgagcagaccgtgcgcgagaagctgccaccgggcttccaacgcagtgaattcctgatcgagaaaggcgcgattgatatgatcgttcgccgtccggtcatgcgtgaaaccttggccagcattctgtctaaactgaccaaccagccgcagcctatcgtggctgaagccaaaactgtcgtagtcgaaaacgacgatgcagtagaaggctaattcggcctgcgggcatcacttttaccgagtgatgcccgattatcgctgacagaaattgcgagctaaaggttgattaaccacagggtaatttaaccggcgtctgtcaggcgttctgcctggcgaacaccatggaatgaatccaaggccagtgacgggactcatgaataatcatcaaatcccccaagccacgtcgcctttagccgcgtggctttactatcttgagcgtttacattttcaggccattgatatgggtctggagcgtatcaaacaggttgccgagcggctcgaactgctaaagccggcgcctatcgttttcaccatcgccggtaccaacggtaaaggcaccacttgctgtacgctggaagcgattttactcgccgccggtttacgagtgggcgtctacagttccccacatttgctggaatacaccgagcgggttcgcattcaaggccatgagttgcctgaatctgaacatagccaatcttttgcctatatcgaagccggtcgcggcgacatttccctgacttattttgaattcagcacgctatccgctttgcatctgtttaaacaggcaaaactggacgtggtgattctggaagttgggttgggtgggcgtctggatgcaaccaatattgtggattcagacgtcgcgggcgtaaccagtattgcgttggatcataccgactggctgggtgcagatcgcgaaagtatcggtcgcgagaaagccggcgtattccgcgccggtaagcctgcggtggtcggcgagccggatatgccaaactccatcgccgctgtagctaaagagttgggcgcgcatttgtatcgccgcgatgaagcctggaaatttagccaacaggattctagctggaactggcagtgcggagcctctgaactaaaggatctgccgttgccaaacgtccccttggctaatgcagccacggcgttggcggtattgcactattcgccgctccagatcgctgaggaagctatccgtcaggggctgatcgcggcgcagttaccggggcgtttccaaattgtcagtgaacgacctatgctgattctggacgttgctcacaatcctcatgccgccggttatctcgccgatcgcctgtctcaattaccggcgacccagggtaaagttcgcgcggtagtggggatgctggcggataaagatatcccaggtacgctggcgtgtttaagcccgcaggttgatgaatggtactgtgcgccgctggaagggccgcggggagccagcgtggcagctttggcgcagcatcttgaagcatcgcggcaatttaccgatgtggcaacggcgtggcgtcaggccatgcaggatgcgacagcggaagacgtggttatcgtgtgtgggtctttccttaccgtggctcatgtgatggaagcattgaaaacggggagtgtgagtggccagtaaattccagaaccgtttagtgggtaccgtcattttggtggcgctgggcgtcattttattacccggtttgctggatggtaagaaaaagcattatgaggatgagtttgccgctattccattagtacctaagcccggcgatgcggaagaaatcgacgtggtgccgccggtgaaccagcctttaccgacgcagccgccagaaggtgcagcggaagccctcggagccaataaaggtgaagaatcagcctctcaggcagctaacgatgcaggtagcgttgcaactccgccactggtcgtcagtaagcctattgaaactaagcctgtaccgccaaaaccggtagaggttaagccgatagaagttaaaccgatagaagttaaaccaatagagaagaaacaggccgcgcctaaaccggttgaggtgaaacctaagcctgaagttaagccgatagaaaccaaacctgaggcgaaagtggaagaaaaagcgccgacaggacaggcctatgtggttcaactgggggcgctgaaaaacgcggccaaagtgaatgagatcgtagcgaagttacgcttatcgggtcatcgcgcctataccgtgccggctacgccggttcagggtgaaattacccgcgtattcgttggcccggatgcttcaaagcagaatttgcaatcggcgttgcctgaactgaatgccctaagcggcctgaacgggcaggttaaggcatacaataccggccgctaaagtgatttacccttgtcccgccgcggtagaacgacggctggcaaggggttatagctaagtttgtgcggcgattgttgtttttaaaatcgccgcactttatttatcggagcgcaggaattcccctacgcaaacgttttctttttctgttagaattcgccgcgaacaggatgtaggggcgatttcatcattggaatagtcatggtttggattgattacgtcattataggaattatcgggttttctgctttagtcagcttgatccggggttttgtccgtgaagcattgtcacttgtgacatggggatgtgcgttttttgttgccagccatttttatgcttatcttgccatttacttcacgcgttttgaagacgaactcgtacgcaatggcatcgcgatcggcatcttgttcattgcgacattgatcgtcggagcaattgttaactacgtgattggctcgctggttgagcgtaccgggttatcgggaacggacagagtgttggggatctgtttcggcgcactgcgaggtgtgttgatcgttgccgccatgctgttctttctggatacctttaccggcttctcacaaagtgaagactggaaacagtcgcagttgattccgcagttcagttatatcatcaggtggttctttgactacctgcagagcacgtcgagtttcttgccgaatcaattaccgattcggagcggcttatgaggaaagacacatgtgcggtattgtcggtatcgccggttttacaccggtaaaccagtcgatttatgatgcgttaacggtgcttcagcaccgaggtcaggatgccgcaggcatcgtcaccattgatgccaataatggattccgtctgcgtaaagcgaacggtttggtgaaggatgtttttgaaacccggcatatgctccggctgcagggaaatatgggcattggtcacgtccgctacccaaccgccggcagctccagcgcctctgaggcccagcctttctacgttaactcaccgtttggtattacgctggctcacaacggcaatctgactaacgctcaccagctgagaaagcagttgttcgaagtctcccgccgtcatgtgaataccacttctgattcagaaattctgctaaatatcttcgccagcgaactggatcgcttccaacattatccgttggaaacagacaatatttttgctgccgttgccgccatgcatcagcttattcgcggtgcttatgcctgcgtagcgatgatcataggccacggtatggttgctttccgcgatccgaacggtattcgccctttggtgattggtaaacgcaccctggttgatggccgtaatgagtatatggttgcctctgaaagtgtggcgctggatacgctaggctttgaatttctgcgtgatgtggctccgggcgaagcggtgtatatcaccgaaaaaggccagttgtttactcgccagtgcgcagaaaatcctaagtacaatccttgcttgttcgagtatgtctattttgctcgccctgattcctttatcgataaaatctcggtctacagcgcccgtgtacgcatgggtcagaagttaggggctaaaattgccaaggaatgggaagatctggatatcgacgttgttattccgattcctgaaacttcctgcgatatcgcgttagaaatcgcccgtattctggataaaccgtatcgccagggttttgttaaaaaccgctatgtgggccgtacctttatcatgccggggcagcaggaacgccgtaagtctgtgcgccgtaaactgaacgccaaccgcgccgagttccgggataaaaacgtgctgctggtggatgattccatcgtgcgtggcactacgtccgaacagatcgtggaaatggctcgcgaagccggagcgaagaaagtttactttgcttccgctgcgccagaaattcgtttccctaacgtttatggcattgatatgccgagtgccaatgagctgattgctcacggacgtgaggttgacgaaatcaaacagctgatcggcgccgatgccctgattttccaggacttaagcgatttgattgacgcggtaggtgaagacaatccggatattactcagttcgaatgctcggtatttaacggcatttacgtcactaaagacgtcgatcagagctatctggaatatctggagtctttacgtagcgatgacgctcaggcgttgcgtagtcaaaatgaagcagaaaaccttgagatgcataacgaggggtaattctccgcacgctatttcgctggttcagtagcgttgcagcgttaagtgccaaggggctttctgggtattaaaaaggtgcaaccggctaatcaaagcggtgcacctttttttgtcatatcttgctaatatttctgtgatacggcacagtttgtccctattccattatttttccgcatttttctttgaatacgcggccagtttgaggcagttcttcatgaggcgacttattatcggtatttccggcgctagcggggcgatttacggcgttcggctattacaggtgctgcaaagcgtcgctgatgtggaaacccacctgattatcagtaatgctgcccggcaaactttggcgctggaaacggatctgagcctgcgagatgtacaggcgctggccgacgtggttcacgatgcccgagacattgctgccactatttcctccggttcctataaaaccacaggcatggtgattctaccgtgctcgatcaaaaccctatccggcattgtacatagctataccgacggactgctcacgcgtgctgccgacgttgtgctgaaagaacgccgcccgctagtcctgtgcgtgcgtgaaacgccgctgcacttaggccacctgcgcctgatgacacaagctgctgaattaggagcggttattatgccgccggtgccggctttctatcatcggccaaccagcgtacaggatattatcgaccaaaccgttaatcgggtaatagatcagtttgatatcgaattgcctcaggatctgtttgttcgttggcaaggctcaaattaacaatatttccccaaattgatacatttgtgcaacatcgcactaaaattaaacagattatgcaccacaatgatcctgcttagtttcctgcgtagttggacgaatttcgcattttgtcctgtttgcgggcgctgacgtctttcgaactgtcgattttagtggttatcgcgctgataatgggactgatggaaatcctttcattattcgtcattactggcacgattactgcaaattgatttacgaaagctcagggacgacaaaatagcaacgtactccgtggcatcgaaaatcaatttgagggtaatgtatgaaaaagcagatattggccatttctatggtactggctctggcaaccgccagcagcgcctttgctgccatacctaagacgttgaaagtaggcaccgatcctacttatgcgccattctcgtctaaaaatgccagcggtgagttggtgggtttcgatattgatttagcgaaagaactctgtaatcgcattgatactaaatgcacctttgtcgacagcgatttcgatgcgctgatcccctctctgaaagcgaaaaaaatcgatgccatcatcgcatccttgtccattactgagaaacgacagaaagaaattgccttcactgacaaactctacgcggcgaactctcgcctgattgcccagaaaggctcgaccattcaacccacgctggaatctctgaaaggcaagcgcattggggtattgcaaggttcaacccaggaagcgtttgccaatgctttatggcagcccaaaggggtagatgtggtggcttatcagaatcaggatctgatttatgccgatctggcttctggtcgtatcgacgcggccttccaggatgaagtggcagctagcgaaggcttcctgaagcaaaaaggcggcaaagattatgcctttgccggtccttcggtaaaagatgacaaattcttcggcgtgggtactggtatgggcttacgtaaagatgataccgaactgaaagcggcgctggataaagcctttgccgaaatgcgcaaagacggcacttacgacaagctggcgaagaaatacttcgattttaacgtttacgactagttttaccgacaggttgctcagcctctgccgcaatggcagaggcaatttctgacaaccaaccagacccacactcagtgatagcaggaaaaaccgatgctggatggatattccaaactgatatttgatggtgcgctggtgacgctggaattagcgttgtgctcggtgctgctggccttggtgataggcatggtgggcgctggggggaaattatccgctaatcgcttgttgtccggcgtatttgagtgttacaccaccctgattcgcggggtgcctgatttggtcttaatgctgctcatcttttacggtttgcagatcatcttaaattccatcactgaatctctgggattcagtcagatcgatattgatccattatctgccggtattatcacgttgggttttatttacggcgcgtattttaccgaaaccttccgcggtgcctatatggccgttccccgtgggcaaatcgaggcggcgactgctttcggtttttcccacagcaagatattccgtaggattatgtttcccgccatgatgcgctacgccttgcccggcattggtaataactggcaggtgatcctaaaagcaacggccttggtctccattctgggtttaaacgatgtggttaaagccacgcaactggcgggtaaagggacttacgagccgttcttctttgctatggtggccggtgcggtttatctgatcttcaccacgttatccaatggtgtgctgtggtggctggaacgccgttattctcaaggtgtgaagagggctgagctatgatggatattctgcatcaatactggcagtcactgctttggagcgatggctaccgttttaccggcgtggcgataacgctgtggctgctgatttcttcggtggtgatgggcgggctgctggcgattccgctggctgtagcgcgggtttcaccaaatcgcgcgattagcctgccggtatggttcttcacctatatctttcgcggtacgcctctctacgtacagcttttggtgttttactccggtatgtacagcctagaaattgtgcgcggcagcgagtttttaaacgcctttttccgcagcgggctgaattgcaccattctggcgctgacgctgaatacctgtgcctacaccacggaaatctttgccggagccatccgggcggtgccgcagggggaaattgaagcggcgaatgcctatggtttttcccgatttaagctctaccgctgcattattttaccttcggcgctgcgtatcgccttaccggcttacagtaacgaagtcattttgatgctgcactccacggcgctggcttttaccgccaccgtaccggatatcctgaaaatcgcgcgggatatcaacgccgcgacctatcaacctttttacgcttttggcatcgcggcggcgctgtatctgataatttcatttggtttgatcagcctgtttcgtcaggcggaaaagcgttggttggcacatattaagccgcagtcgacgcattaaaggtttatcccgtcggggctacgggatggggcattttaaatcagggatgcgcaggctccccgctggcgccaagtacggagagaatgatgataacaacatccgaaaccaaattagccgtgatcgagctgcataagcactatggcgagcatgaagtattaaaaggcgtatcgctatcggcgaaagccggtgacgtgatttccattattggatcatcaggatcggggaaaagcacctttttacgctgtatcaactttctggaaaaacccagtgaaggttcgattagcgtgaataatcaagacataaagttagttcgtgataaagacgggcaactgaaagtattcgataaaaaacagctgcaactgttgcgtacccgcctgacgatggtattccagcattttaatctgtggagccatatgacggtgctggagaacgttatggaagcgccaattcaggtgctcggcctgagcaaatcggtggcgaaggagagagcgattcgctatctggataaggttggcattgatgaacgggcgcggcaaaagtatccggttcatctgtctggcggccagcagcagcgggtttccattgcgcgggcgctggcgatggagccggatgttttgctatttgacgaaccgacttcggcgctggatcctgagttagtaggagaagtgctgcgaattatgcaaaaactggcggaagaagggaaaaccatggtggtcgtgactcatgaaatggagtttgcccgccacgtttccaaccatgtgatatttctgcataaaggtgttattgaggaagaagggccaccggccgaattgttcggtaatccgcaaagtgcgcgcctgaaacagtttctttcaggcgcattgaaataatcaaaaaaatggataattagaggtgcggacgaggaagcggcttttgcagcacatctcgcagcgcctcttccaaatcaaaataacggaaaccgaaaccagcctcttctatacgtttcggcaatgctctttggctgcctaacaccaataccgcggattctcccatcagtagccggataacggtggcagggacgcgcataaaggccgggcgattcaatacgtcccccagcgtggcgctgaactgctcattatgtaccggataaggcgcaaccatattgaacgggccgtgcagctcgtcgctggttagcaggtaatgaatgccattgaccatatcatccagatgaatccatggcagatattggcgtccatctccgataggtccgcccaagcccagccggaaaatcggcaacatttttgccagggcacctccgtcggcagccagcactacgccggtacgcaacaaacacacgcgcgtctgcgggctttctgccgccaacgccagattttcccaacgttggcaaagctgatgggtaaattcatcatgaggagtttcttcctcagtgacaaaagagtcgccctgatcgccgtaaaaacccacggcagagccagaaattagcactttaggcggttgctgaccggctttaatcagattggcgatacgctcggttatttgccagcggctttggcacagacgttctttttgctgcgccgtccagtgcttatctgcaataggttcaccggcgaggttaattaccgcatcaaagtcatcgaggttctgtcggtcatctagcgtagaccagcaggtaacctgttgacctaacacccgtttagcgcgctcgggatcgcggctcagcacggtcacggtgtgcgagaggcttagcagtcgctgggtcaggctgcggccgatcagccctgttgcgccggttatcaagatacgcatggtaaacctccgtttatctctggcccagtttcaccctcggcgcagttcctgatgatctaatcatcacatcagtttgtctgcggaaaatctgagtaaaaagtctttttcgcgctcttttagcataggcgatccggggcatttatcccacgatagagagcacatcctgagtgaattatttctaacaggctgcggcgataaatggccagtaaccaaatgatatttcgattaataaaccgcgaagaaacggataaaacgaggcattccagagaaaatcactggattgctcaaaatattcgattaatgacttatctctttactttcgctgccgataacactttataggtattggcgaatgagtatgagcgagaaagcgatgagctgccagcgcggtgaaatagcaagcctgagttcgaaatagagcaggcaacgcggtctgcgaagtcatcagcttgccggtgtctgtgtaggggattttctgatatgaggtataaatgccccactgcggggcattgatggcaacttagctggctttggctagctcataggcgcgtagcgttgccgggcggctggcaatgctctggaaccagcgttcgacggcgggatagtcggccaaatcgatattctgatttttatgggaaacaacccaaggataagtggcgatatcggcaatactgtaattttcaccggccaggtaggcgtgtttttgcagttgggtatctaacacaccgtacaagcgctgggtttctttctgatagcgttcaatggcgtaaggtattttttcggaagcataaatgctgaagtgatgattttggccgagcatagggccaaaaccgccgacctgccagaacagccattgcaaggttgccgtgtgttcacgtagctcagcgcttagaaatttaccactcttttcagccagatacagcaagattgcgccggattcaaaaatactgatgggatcgccgccgccgtctggacgatgatcgacaattgccgggatcttattattcggtgatatagcgagaaaatccggtttgaactgatcgccggcgctaatatttatccggtgaagattataaggtagtccagcttcctctaaaaacagggtgatcttgtgtccgttaggggttggggcgtaatagagatcgatcataacattctccaaagcgacatcagacagggggaaataacgacttcatttgttttttaacaccaaaacaggctcaggcacatggaaacaaggtaacaaactgagagtgaataagtgaagataaattgatctacgtattgtccacaaatctacagtaaataagagaattcagtgtgactttgataggttacctgaatcaaaatcacttcaacgctggggcacaatttagccataaatatgacgagtccccttatttatacttgcttgcaggatttctgctagagtggaaacactgtgtcgagggagcttaagtacacatgaaactcaatattgagattaactgctcttatgtatgtgagccgatatacaggaaggatggcagcctactcgctgctgaattgctcagccgttttacgacaaaacctttggatttaccgattaatccggaagatttttttaacgagttagacagcgaggggaaaggaaaactgttccgcgatcagctgttggcagcgcagaagtatagccagtggtttatcgataatcaggtactgctttccatcaatattgattttgatacggcaggaattattgtcagagacagcgaattgcaggcgttactaaataccatgccgtttttgcgtctggaattaatggagactttctccaatttatccgatggtaacaacaatccgttgctgcgagacttggttaaactctatccactatggttagacgatcttggacgcggagattccagtctgaacgcggtgacggccaatatcttcgaatatgtcaaaattgataagcactttttctggcagcataataagcacaccttcccaattctgattaataacgtcaaaaaatactgcgaaggcgttatcgttgttggcgtagaaaatcagatcgaatccgagcaattgcagggcagtaatattgatgccatgcagggttatttatttaactctctgactttggatgaactgacccaaacaccccgctaacaggtcgttaagttatgcggttaactttcctgcaccaactgacgattttctctacgataataccggtattgcacaaatgaaggcgctgttttactcaatgcgctggtaataagtcgtttattctcggaataatctcaattattgaatgttaaactaggccgtatttattaatgagggctgagacggcgataacctgccagacgccgttgctgatgatcaaaaataaggtgatgccatgaagttaatgtttgcttctgatctacatggttcgcttactgcaaccgataaagtattggaaatttttaaccgtagcggtgcgcagtggctggttttgttaggtgatttgctcaaccacgggccgcgtaatgctttgccggaaggctatcagccggcgcaggttgccgagcaacttaacgcttacgctgatcggattattgccgtgcggggaaactgtgacagtgaagtggatcagatgttgctcaactttccgatgatggcaccctggcagcagattattttaccggaaagacggttgtttttaacccacggtcacctttatcatcctgcggaacgtcctccattgcgttgcggggatgtcttggtttatggtcatacacatctgccgcaggctcagctacagggtgatgttttttgtttcaatcccggctcggtcagtattcctaaaggcggtaatccagcgagctacggcatgttggatcaaggtgagttgcaggttttgaccctacaagatgataaacctcttgcccggttggttttaaccgatgagttttaaacgccgagggttatcgtcggttaaaaatacgcgttttacacatacttataatgttgtttttgaaaaacacttgatcaacaaatgcgcgcttatcgtcgcgcccagatagaaggtttcagaggatggtggagcaaaatccaacagtgagcacggaatgggttgatattgttgatgagcaaaatgaagtgattgctcagtccagtcgtcaacaaatgcgtgctcaacgtctgcgccatcgtgctacctatattgtggtgcatgatggtatggggaaaattctggtacagcgtcgtactgaaagtaaagacttctacccgggtaaactcgatgcaacggcggggggagtggtgcaaagcggtgaaaacttcctcgaatccgcccgtcgtgaagcggaagaagaattgggtattgccggcgtgccttttgccgagcacggcctgttctattttgaagaggagtgctgtcgcgtgtggggcgcattatttagctgtgtttctcacgggccttttgcgctgcaagcggaagaaattgatgaagtgcgttggatgttgccggaagaaatcaccgctcgttgtgatgaattcactccggattctctgaaagcgctatctttgtggctgagccgcaataacgaacaggattacggtaagattaccgttcgggaagattaacttcgccgataatctcgcggttatcaataagtgttgctggcaatgaataacaaaaggctccgaataatcggagcctttttcatatcgaatatgagtaaaatcttagcgaacgataatacccaatagaatgcccagcgcgccgaagtcagcgtcgctgaaggtcgtattggcaaaaccaatatcacccagcactggcagtaggaataccggcaagaaggtaatcagcaggccctgggcgaaagcccccagaatcgccccgcgacgaccaccggtcgcgttgccgaacacgcccgcagcggcacctacgaagaagtgtggaacgacgcctgggataatcaccgtcatattcagtaggtacagggcaaacataccaatcaaaccggcggcgaagctgctcagaaagccgaccaataccgcattgggtgcgtaagggaatacgactgggcaatccagcgcaggtttggcgttaggtaccagtttgtctgaaatgcctttaaatgccggtacaatttctgcaatcaccatgcgtacaccttgcagaatgatataaacacccgctgcgaaggtaatggactgcatgatagagaacataaaccagtttttgccgccgctcagttctttcaccacatcggccccggcaaacaggcaggttaccaggaagataatgctcatggtgaaagagatggcaactggcgtatcccgcaggaacagcaggcttttcggcacgttcatgtcttcggtcgaatgttctttattaccgaatttgctgccgataaaaccggccagcacataagataacgtcgagaaatggccaatagccacgtcatcggaaccggttacttttttcatgtacggatgagcaatcgcagggaagaacaccattgccacgccgacgaccaatgaaccaacggctatcagcgtaataccgctcatgcccgccgttgccagaatcactgccaccatcattgacataaacagcgtgtgatgaccggtcaggaagataaatttccatggggtgaaacgggcgatcagaatattgatcaccatagcgaagaacatgatcatcgccatttctttaccgaagcttttttgcgccacggagacaatggcttcgttgttcggtacgacgccctgaataccaaaggcgtgctggaaaatgttagcgaaatcacccagagaggaaaccaccagaccggcaccggcacccaaaatcacaaaacccatgatggttttgacagtgcctttaatacattcggttacgggttttttctgagcgattaggccgattaaggcgataaaaccgactaataccgccggttcggacaacacatcgctcatcagaaaacgaaagaaatccatattgacctccgcttacagcgcgcctaattcggttaatgcaacggacaaacgctctttcatggcttttttatcgatcatgttatccagtgcgacaattttgcccgtcacggattgcgcgatcagctgttcggcgatgtctttggtgccaacataaatatcgctcggtgtgcctttggctgagcctaaatccacatgatcgacttcagcgctgacggccagctctttcagaatgtttttaatactgatttccatcatcaggctggtgcctaaaccgttaccgcaaaccactgtgattttcattttatttccccttggaattggtgatcccgattgcttcggtggttaaaccttcgctaatcgcggattaatagcgcgcaatgacagataaaatgtcttgcgtcgttttggcgtttaacaggctgcttacgtcattatcgttatcgaacaattgagcgagttgagagatagcctcaatgtggctattgctgtccgtcgcggctaatactattaataattttaccgggtcgttctcttcggcatcgaaattgacgccggaggaaatgaccgtgagcgccagtgaaagcttattgacgccttcttctgggcgagcatggggcatggcgataccggggccaacaacgtagtaaggccctattgcctcgtgagagcgataaatggcatcgacgtagcgtggttcaacggagccattatcaatcaatggctgacatgagatggcgatagcatctcgccaatctttggcctgttctactacctgaacgacattcgccgttaacaatgtctttaacatgagatgagtcactcccgataacaattcacatgagagtagatatttcgctcattgattaatgtgatgtttatcgcatttgatagcgctacctgatagcgctatcaataattgtgatagcgctatcatttaaccgatcctggtctttggctaaatctgccccaggcatatacaatgcgactcgatatctgcgctgctaatagtaggcggagcgcaacagacaggctgaaaacggtgagtttcagcggacagggaacccagaatggaaaaaacgcgtaagcgccgtaacaccgggagagtcacgctgcaagaggtggccaactacgccggtgtcggaaccatgaccgtttctcgtgcattgagaaccccggagcaggtttctgacaagttacgggaaaagatagaacaggcagttgaagagcttggctatatccctaatcgggcagcaggtgcgctggcgtctgggcatagcaataccgtagcggtgctgattccatcgctgacagataagtcaagctcgcgctttatgcaggctttacagcaggtgctgaataaaaacgaatttcagctgttactaggctgtcacgaacacaatcagcacaaagaagccgaaattttaatgaccttattgcagagtaatccggctgcgctggttatttttggttctcagctggcagagaaaacctatcaaattcttgagcgagcaaatattcctacagtgaatgttgttggctcgcgttacagcaaggctgaaatcacgctggaggcggcgttttttgaagccgcgcataaactgacggatcatttgctggatcaaggttatcagcatattggttacgtgggcgcgcatatggataaccgcttgcaacggcaattgctcaatggttggcataaagccatgctgagccgctaccagaattcagatcagattgtgacgactccggaagccgccagcctgcaatttggccgctatgcgctaacggaaatgctgttgcgtcagcctgagctggatgcggtgatttgtagccatgaagatattgcgttgggcatcatgtttgaatgtcagcggcgtttgctgaagatccccggtgatatagccgtggcttgtctggatggctcagacagttgtgaccaaacgcatcctaccctgacgtctattcgtattgattacaaaaaaatggggcgggaggccgggaaactactcattgatatgctcaatgatagtgatgatgacgaagaacctcggacgcagaccttcagttaccagttagagttgagacaaagcagttaaggcagttaaggataggcgggcagatttcaccgtttaaaccataaaaaacgccagcgctaaggctggcgtttatcattcaaaccgaagcgtaaattaagacgcgtcggcctgagcagactgaatagcagtcagagcgacggtgtaaacgatatcgtctaccagtgcgccacgggacaaatcgttaaccggcttgcgcataccttgcagcattggcccgatagagaccagatctgctgaacgctgtaccgctttgtaggtggtgttaccggtgttcagatctgggaagatgaacacggtagcctgacctgcaaccggagagttaggcgctttggatttcgctacgtcagccatgattgccgcatcgtactgcaacggaccatcgatgatcagatctgggcgtttttcctgtgccagacgggtcgcttcacgcactttctcaacgtcactacctgcgccggaattaccggttgagtaggaaatcatcgcaacgcgtggttcgataccgaaagcggccgccgaatcagcagattgaattgcgatttcagacagctgctctgcggttggatccgggttgattgcgcagtcaccgtaaaccagaacctggtcaggcagcagcataaagaacacggaagaaaccagcgagctgcccggtgcagttttgatcaactgtagcggtggacgaatagtgttcgcagtggtgtgaaccgcaccggaaaccagaccgtcaacttcgccttgttccagcatcagcgtacccagaaccacgttgtcttccaactgttcgcgggcaacgacttcggtcatgcctttgctcttacgcagttctactaaacgtggaacataacgttcgcgtacggcaaccggatcaacaatctcgatacctttacccagttcaacgccttgagcggcagccactcgacgtatttcgtccgggttacctaacagcacgcactcggcaatgccgcgttcagcacagattgcagccgcttttacggtgcgtggctcgtcgccttcaggcagaacgatgcgtttgccggctttacgtgccagttcggtcagctcgtaacggaatgccggtggagacagacggcgtgaacgctcggaggtggcgctcagtgagtcgatccactcgctgttgatatggctggcaacgtagttttgcagcttttcaacgcgctcatggtcgtccgcaggcacttccaaattgaagctttgcaggctcagagaggtctgccaggtgttagtgtcaaccataaatactggcaggccagtctggaaggcacgttcacacagctgtttgattggctcgtcgatagcgtagccaccggtcagcagaattgcgccgatttcaacaccattcatcgccgccagacaggctgaaactaatacgtctgggcggtctgcggaggtgaccagcagagaacccggacggaaatgctccagcatgtgaggaatgctgcgcgcacagaaagtcacggatttaacgcggcgggtattgatgtcgccttcgttgataatacgtgcgttcaggtgtttgcacatgtcgattgcgcgggtagcaatcagctcgaagctccatggcacgcagcccagaactggcagcgggctgttggcaaacagctgagtcggatcgactttcgctacgctggccttggtggaatcatcaaagatttcagacaggtcagggcgagtacggccttgttcatcaaccggggcattcagtttgttaatgataacgccggtgatgtttttgtttttgctgccgccgaagctggaacgagccagttcgatacgctctttcagctgatctggagaatcgttacccagcgccagcacgaacacgatttctgcgttcagcgttttagcaatttcatagttcagcgcgttggcaaactggtgtttgcgggttggcaccaaaccttcaaccagaaccacttcggcatctttggtattttcgtggtaacgcgccacgatttcttccatcaacacgtcctgctggttagaactcagcagagtttccacgtagttcatattcagcggctcggcagcggtgatgctggagttggcgcgaatgatagtggtggtctggtcaggcgcatcgccaccggaacgcggctgggcgataggtttgaacacgcttaagcggacgcctttttgctccatggagcgaatgacacccaggctgacgctggtcagacccacgctggtgccagttgggatcaacataattgtacgggacacggctaaacctctttacggttgcactcaggcgacggttctcgcctgctgtcgggcgaaaacaacaccgccagccttggctgacggtgttgaggagacttatgcagtcagacgggctgcgtcttgtgcgataacaaactcttcgttagttgggattaccatcgccagacggctgccatctttagtgatggtgccggatttaccgaagcgagcggccaggttacgttcgtggtcaatttcgaagcccagcagacccagtttatccagagtcagttcacgtaccatagctgcgttttcaccgataccgccggtgaagataaccgcgtccaaacggccgtccatcagtgcagtgtaagcaccgatgtatttggccaggcggtggcagaatacgtccatcgcgcgcttagcgtcagctttggtgtcgtagttgtcttcaacgtaacggcagtcgctggtgacttcggtcagacccatcaggccagactctttggtcagcattttgttgatttgatcaacgctcatgcccattgcatcatgcagatggaagatgattgctggatcgatgtcaccgctgcgagtccccatgaccagaccttccagcggggtcagacccatagaggtatcgacacatttaccgttgcgaactgcggtaacagaaccgccgttgcccaggtggcaagtgatcacgttcagttcttccattggcttgttcagagccttggccgcttcctggctaacgaagaaatggctagtaccgtgtgcgccatagcgacggatgccgtgatctttgtacaggctgtacggcagggcgtacaggtaagattcttctggcatggtctgatggaatgcagtgtcgaataccgcgacatttttattagccagattcgggaaggatttcaacgcctcagcgataccgatcaggtgcgctgggttatgcagtggtgcaaacgggatcgaatctttgataccctgaataacttcatcgtcaataattactgatgaagtgaatttctcaccgccgtgaacgatacggtggccgacagcagtcaactgggcagaaagctctggtttttgtgccagaatagtattaacaatgaaattcagtgcttcgctgtgcgctgcaccagcacccaatgctgcttcttgtttgccgccatccattttccatttgatgcgggcttctggaagatggaagcattcggctaaaccagacaggtgttcttcaccgttggtcgcgttgatcacggcgaatttcagggaagaactaccgcagttaagaaccagtactagcttactcgacatggaagtacctatttattgtcgtgtttgcaataaacacgtggttaataaaacgtcaatctgaccacaagcgtagcgcataatggtgatgacattaatgattaacatcatgcgataaatgaaaaaggcatgatggtggaaaaatcgctgatcaagtgtttaaaacctggtggttaaaatgcatcaacgatttaacaaaaatgattaatttgctgctaaaagttgacatattgtgcgtcttcttctagcggccaaaaggccgggctaggataccgatagcgcgcgctaaaaacaaaatatatttaatccatccaatttatcattggtgggttgcaagaaaattttaaattttgtctttgaagttgaggtgagccatgacatccaaaccttccgattccgttagctggtttcaggtcctccagcgcgggcagcactatatgaaaacctggccatcagacaaacgtctggcgccggtgttcccagaaaatcgcgtagtgaatgcgacgcgcttcggtattcgctttatgccgccgctggcgattttcacgctgacctggcaaatcgcgctgggtgggcagcttggccctgcgattgctaccgcactgtttgcctgtggtttgccgctgcaaggtttgtggtggctgggcaagcgctctattacgccgttgccgccgactttgttgcaatggtttcacgaagtgcgcaataaactggctgacgccgggcaggcggttgcgcctatagagaaaactccgacctatcagtcgctggctgaattgctgaaacgggcgtttaaacagttggataaaacttttctcgatgatttataacttttgcaacgataactaaatacaaatccgagagtcggcagcggctctcggtgaatcctttcaccaaaccccctgtcaaatcaaagaatggcccgctagtagtaccactgaaagatgcgctatgcgatgatttcaccattaacttgcctttcaggagatcatgatggatatgactaacgcccaacggctgatcctttcaaaccaatacaaaatgatgaccatgttagatccggataacgccgagcgttatcgtcgtcagcaaaccattgtcgagcgcggctttggtctgcaaatgcgcgagttggaccgtgattttggtgagttaagcgaagagacctgccgcaccattattaatattatggagatgcaccacgcgctacaggtgtcttgggacaatctgaaagataagcaagatctggacgggcgccgcatcgctttcctcggtttcgatgctgccaccgaatcccgctacctgagctacgtgcgctttatggtgaataccgaagggcgttatacccatttcgattccggcactcacggtttcaatgcccaaaccccaatgtgggataaatatcagcgcatgctgtctatctggcagtcttgcccgcgtcaatatcatttgagcgcggttgagatttcgcaaatcattaatgcctgattaatcacccgcaaagccgcgactgatcgagcgagacgagggggaataggccattggctcggtggaggtttgtccattacggtgcccataggtatattaccccctcgttgacccggctctgtggccgggcttgccgttaaactcaataaatagcctgatgatttaggtttcaagaggatgtgcttgtggagtgcaaaggttttctttttgacttggatggaacgctagtagattcattgcccgccgtggagcgagcatggattggctggggagccaggcacggtatcgaatcatcggtggtattggactttatccacgggaaacaggctattacctccttgcgccactttatgccggggcagagtgatgaggctattcaggccgagtttctgacgttggaaaaaatcgagtcggaagataccgaaggcgtcaccgcattgccgggtgcagttgcgttactggagcgtctgaatcaattggacattccttgggcgattgttacctcgggttccgtgcccgttgcgtccgcccgtcgcgcagccgctcatttaccgttaccggaagtgtttatcacggctgaactggttactcacggcaaaccgcagcccgatgcctatctgctgggcgcgcagcgtctggggctgaaaccggaagattgcgtggtggtggaagacgcgcccgcggggattctttccggtctggccgcaggttgtaaagtgattgcggttaacgcaccagcggacacgccaaaacgggatcaggttgatttgattctgacctcccttgagcaaatcgcgatagagaaaacgctcaacggcgcggtgattcagcgggttaagtagctttcctgcttattcattgaatctgcgataaaaaccaagagcgccttaaggcgctctttttacgtttaccgagtcccagctgcgacttaaccggctggaagggaaaaactggccgccagactctccagattttgcggtatcaccttaatcacgccgccgcgcggactatctatatcggcaatcaacataaacgagaaagagataaccagcggtaatatcaacaacatgatttttcgccctttgccgtttttaaaaccgtagcccaccaacgtgcagcagcagattgcaataatactcatcaacatccatgccgccggaggaatacggttccaccaagccgcttgagtgtaactggctgagttcaatacatcgttcattccagccagtaccagcgccatcggtggcgttggctgttgcgccgcaggttcaagcagcacagtccagagttcatcctgtagctgattggattgctggttaatttccagcagcctggctttatcgcgggtgcgataaaacagaattcgttgatctacgtagcgtatcagcaggtctttggttttatctcgcgcggcgggcgagagcaggtcggcacgcagatattcagtgctaatagcgttggcttccgcttcttcttgatttttacgtaaatcgtaacggctgatagccatggaaaaactgaagccgataatcagcccgagtagcgtcagtgtcgcaccttgaataacggtgaagttttcctgagtgttgccatccatggtctgtccgcgacgaaaaaacgcctggccgataagggcgcagccccacagcaccagaaaagtcaggagaaacagaaccagcggataattagtgatattaagcatttagcgaccttgctcttagggataatttcagcggtaactgtcacgcggctgttatacggccgcgtttacggagtcacccaaatcaggcgggttgccaccaatctagtatagtcagatgttgcccaaaccaccgatatgctcaccattaatatggatatgtatcactaacgaacaaacgactcatttccggcgaataatcagcaaatcggcaatgaattggataaaaatacgccataaaaacggtataagactgataagcgacaattttttaatcaatattgatcgcaggcagttgaactcgcggcgtttaatgctttactgataacgcccaatctttgatttccgatttgccagcgaggccattttgaatagcgaactattgtgggtattaactttacttctgatagcgataggactgtttaccactaataaattgagaatggacgtggtggcgctgttggtgattattgcctttgtgatgagcggcacgctgacgctggcggaggccaccagtggttttagcgatcccaacgtgattttgattgccgcacttttcgtgattggcgaaggtttggtaagaaccggcgtggcttatcaggtgggggattggttggttaaggtggcagggcatagcgaaaccaaaatgctggctttgctgatggttaccgtagccggattgggtgcctttatgagttccaccggcgtagtggctatttttattccggtggtgctaagcgttgccagccgaatgaaaacatcacccagtcgtttaatgatgcccctgagctttgccggattaatcagcggcatgatgacgctggtggcgacgccgcccaatatggtggtgaacagtgaactgctgcgagaaggcattcagggtttcgggtttttcggcgtcacgccaattggccttattattctgctgttgggcgtaggctatatgctgattgcccgccgctggctaggcagcaacgaaccgcgctcagataaggaaaagtggcaacgccgaactttccgcgatttaattcgggattatcgactcactggccgcgcgcgtcgtctggcaattcgtcaacgttccccactgatagggcatacgctggacgaactgcatttacgcgctcgctatggcgctaatgtggttgggattgagcgctggcggcgttttcgccgggtgatggtcagcgcaaccggtaactccgaactacgagaaggggacgtattgttgatcgatatgtccgattgtgacgtggatttacgcgaattctgtagcgatcaattgctggaaccgatggtgctgcggggggaatatttctctgagcaggcgcgaaacgtcggtatggccgaggtttctctgattcctgactccactttgatcgggaaaagcctacgggacatgacattccgcagtcgttatggcctgaacgtggtgggaattcgccgtcacggtaaagcgatggaaggaaagctggtggatgaaaaactccagttcggcgatattttgctggtgattggcgactggaaactgattcgccagcttcagtctcaaaccaaagattttatcgtactcagtttaccggcagaagtggacgaagtggctccggctttgtcacaggctcctcacgcgctgttttgtctggcgttgatggtcgcgatgatgctgaccgacgaggtgcctaacgtgattgccgcgttgatcgcttgcctgcttatgggacgttttcgttgtattgatatggacagcgcttatcgcgcgattcattggccaagtttgattctgattattgggatgatgccctttgcgctggcgctacagaaaaccggtggggtagaccttattgttcacggcctgatggatgtcgcgggcggcgcggggcctcgagtaatgctgctgtgtctgttcgtgctttgcgccacgattgggttgtttatctctaatacggccacggcggtattgatggcgcccattgccatcgcggcagcgagagaaatgtcggtatcaccactcccattcgccatgattatcggtattgccgcttccgctgcctttatgacaccggtttcatcgccggtcaatactttggtattaggccctggtggttataaatttggcgattttgtacgtatgggcgtgccgtttacgctgttggtgatggccgttagcgtgatggttgtgccgctattatttccattctgattagctttcgtccttggtgccaagagaggttggtggcactgacgtgagccagctcattaggatgggttcacgtcagcgacggatcgggattattccaagggatctaggctgatttcatccaaagacaggctgaagctaggcacgaagacttccataaagtaatccatttccgggcttttacgcaggtcgagagttttctccaatcgcgtttttgcttgggtaaactcgtgatttcccgccgaaagctcttccagacatttcagataggcgcacagggcatcagcctgtttaaccagcagtttctcatcttcactgtaatagttttcatccagcaagcagcggaaatcatgctgtaattcggtgggtaacatttcgatcagtttctgctgtgccactttttcgatttttttatattcgtgggcaatctgcggattgtaatacttgataggcgtgggcatatcgccggtaattacttcgctggcgtcgtggtacatggctaacagcgcgatgcggtcggcgttcagattaccgttgaatttacggtttttgatgattgccagcgcatgagcgacaaaggccacttgcaggctatgttctgatacattttccgttcgaacattacgcatcagcggccagcgattaatcagtttcaggcgggatagatgggcgaagaagtggctctgactcataattttctctctttgttttttctacgacgataaatcggtaatcaaacagggagtcggggtaattttaggtttatagcctaacagaagaggaggcgggttttgtaatttctcatctgcgatagcgatgatgtgaccagataacctgggttgggttttgaaagcctgacggttcagttgctccccactcgcggagacggcgataaaatgtctcgagctatgccgtagctttctgataattcgtatcggatcaggtttgaaagccttattgttcggtttttccctcactcgtcgtggaggcttgcgagcagggttgacagtcgccccagctctgtacttggtgcgaaagtggggttctgcgaattttcctcgtacacttttcgtccggcgagccagcgctagattcagctgcgggcgttatcaggatgccatgcttcctgcctctgcggctcaaggcgcgctttgaacagctgccggcccacctcctgattgcgccttattaaaatcaaaaccatttttatgaatcgctatttgcctttcacccttgatagggtttttggccccaagctggccctttcacagcacatgtgatctgcctaatgaagagcgagttgcggcattccgccagccgaagcgatgagcaagagaaccgacgccgtgagaaggcgataggtacggaggtgcggagtgttaagacgtggggaatgggggggcgcgtagtccccccaaatcaattactgatggtatgtctctaggaaccggcctagcttcccgaccgccatttctaactcatctacgcgcggtaaggtcacgatgcgcacgtgatcagggtacggccagttgaaggcactgccttgtaccagtaacactttttcttgcaacagcaaatccagcactagcttctgatcgtctttcagattgaaacgcttggcgtcgatacgcgggaacatatacagcgcaccgcgaggcttcacacaggaaaccccagggatctgattgatcaattcccaggcgcgatcccgctgttcatacaaacgaccgccgggctgaataaactcactgatgctctgataacctcccagagctgtctgaatggcgtgctgcatcggcacgttggcacataaacgcatcgaagccagcatttctaggccttcaatataacctttagcgtgcttcttcggcccgttaagcaccatccagccctgacggaaaccggctacgcggtaagtcttggacaaaccgttaaaggtcacggtcagcaaatccggtgctaatgcagcaatcgaatggtgctgcgcatcgtcatacaaaattttgtcatagatttcatcggcaaaaatgatcaaatcattctggcgggcaatctcaacaatctccagcaacagctctttgctgtataccgcgccggttgggttgttcgggttgataatcacaatgccgcgagtgcgcggagtgattttgctacgaatatcatccagatcggggaaccagtcagattcctcatcacacatatagtgcacggctttaccgctggacagggaaacagccgcggtccacagcgggtaatccggcgccggtaccagcatttcgtcgccaatatttagcaaggcttgcatggattgcacaatcagctcggaaacgccgttgccgatgtaaatgtcctccaccgtcagatcgcgcatatcccgcgcctgatagtgctgcatgatggctttgcgcgctgagtataggcctttggagtcgcaatagccttgcgccgtgggcaggttacgaatgacgtctaccagaatttcatccggtgcgtcgaaaccaaacggggcaggattgccgatgttcagtttcagaaccttattaccttcttcttcaagacgcttagcttcttttagcaccgggccacgaatgtcgtaacagacgttgtccagtttgctggatttttcaatgggggacataaaacagagccttttcactggtaaaagcgtgtcctgttcctggaacacggcaaggtgttcaatgtactccgctgccgcacatttttgaagttctatacatcgctttactgcaaatgtttatcgagggtaactgacttatcatttttcctgtttcattcatcataaaaatcttaatgattagataaaatgaagtgtttgctgtctattttctgatcgaaatgacgtgtttcggcgataaagcaaccggtaacgcataatattcatccagcaatacttatcaacttaacgcgttcccttactatttttacaataaaatattggccaatttcttttatataataagttgatagctaaatattcatgtttttatcatacatattgtagatgccagtctaaaaatggcagggaagctaaaaactataaataggaaaactattaagaacatttaatgtaagggattcattctcgcactttagtagaaaatcattagttaaatctttttgaaaagataaaccaccatctcggtgataagttgtttttttatatataaaataagcggccattaaggtgaatttaattaaaaacagtacattagaagcattaaatttagcggcaagaaatggcgttccccagcataaaaaatcttcatttatcgaagatttagcggttttttgtgacgctattcatataattggatgactggttgggaaaagatgtttttgaaaaagagataaagataacgaaatataagttatttttttgccctactctaatgagtggggtactgtcatacttaacattgtctcatttgataatgttgttagttaaacaccagggtagtttgtaattagaattcaaaaaagtgaagaatacactatgacaaatgcaaatcgtccgataattaatctcgacctcgatctgcttagaacctttgtcgctgttgctgacctgaatactttcgccgccgctgctgccgcagtatgtcgaacgcaatcagccgttagccaacagatgcaacggttagaacagttggttggtaaagagttgtttgcccgccatgggcgcaacaagttacttactgaacatggtctccagttacttggctatgccagaaaaattttgcgttttaacgatgaagcttgcacttctttaatgtacagcaatgtagaaggcgtgctgaccattggtgcatctgatgataccgctgatacgctgctcccttttcttttgaatcgggtggcaacgttgtatccgcgtttagccatagatgtgcgggtcaagcgtgggccggaaattgctgagatgctgagcagtggtgaagttgatttagcgatcaccacggcagcagttgaaagtcttccccatctgatgttgagaacctccccaacgctgtggtattgctctgcggactatcagtttgtccctggagaggccattccgctggtggtgatgaatgagccaagtccatttcgtgacatggcaatagagcatctgacacaggctggtattccgtggcgcattgcctacgttgcttcttcgctttcggccattagggcggcggtgagggcagggttaggtgtgaccgccagacctatcgaaatgatgagtccggacctgcgggtattaggcgaaacagaaggattacctcggttgcctgaaacccattatgcgctgtgcaaagatgatgcatgtgaaaatgagttagcattggcgatttttagtgccttgcaaaatggttatcagccttcattgctgaccggaacagaaccatcccagggttccgaattgtatatcgataattaataagaattatttaacatctagtgtttcgttaatcccctgtttaaacaggggatttttcgtttctaagacagtaaaaacctatttattaccgttttgttgatatttcgtgactaaaggcgcgtttcccacacttattttggggtatagcccaagacagtcaggctgcagtctagactgatatccatatagctccccgcagtattttttttcttttcgttaacacgtcttcaattgactcaaaacgatgtttcactatttttagtttcaataacagctttttatttgttaagaaactgcctaataacactcaaaacgtgttctggatcaaaaaaatacccctagctagtgagtggaagaacaggttattcctgcgacaatggtatagtaaaaacgaaagatccacgttgctttatatgtgcatgatagaactcaacaaatgactgactcgatttagctttcgaggtcgcaccaaatgttaagcaagatcgtgcgtttgtaaattaatgtgtagttacttttgtcaaagttgacaaaaggttattgaaaggagtaaaaagcccacagtaaaacactggctaaatagttgtaaagacagtgtctttgtgtggttattatccttcccttgaatcgatgtggtgcacaactgccgacacaagagcagaacgttcgacgccacttttgatgagtaagcaatgagtatgtcaacaaccactgaagttatcgctcatcactgggcgttcgctgtattcctcattggcgctatcgggctgtgcggtttcatgctgctaggtgcgttcttcctgggtgggagagctcgggcccgtgccaaaaacgtaccctatgagtccggtatcgactcggttggctctgcgcgtatgcgcctgtcggccaagttctatctggtcgccatgttcttcgttattttcgacgttgaagccttgtacctgtatgcctggtcgatttccattcgcgaaagcggctggataggtttcatcgaagccaccattttcattttggtgctgctggctggtttggtttatctggtgcgcatcggtgctctggattggactcctgggcggtcgaaccgccgcgtgagcaaaccgagcacggtcacaaattccaaaggtattccgcccgatttgcgccaataaatacagcgaggcattaacatggactatacgctaacccgcatagaccccaacggtgaaaatgaccgttatcccctacaaacacaggaaaccatcagcggcgatccgctcgagcaagacatccatcgtagcgtgtacatgggtaaacttgagcacgcgatgcatgacatggtgaactggggacgtaaaaactcactttggccgtataacttcggtctttcttgctgttacgtagaaatggtgacctcgtttaccgctgtgcatgacgtggcgcgtttcggggctgaagtattgcgcgcctcaccgcgtcaggctgacttcatggtggttgcaggaacctgcttcaccaagatggctccggttattcagcgtttgtacgaacagatgcttgaaccgaaatgggttatctcaatgggtgcctgcgccaactccggcggcatgtatgacatttactccgtggtgcagggcgtagataaattcctgccggtggatgtgtatatcccaggttgcccaccgcgtcctgaagcttatatgcaagcgctgttactgttgcaggaatccattggtaaagaacgccgcccactttcctgggttgtcggcgatcagggcgtttatcgcgccaatatgcagccagaacgcgagcgtaaacacgctgagcgtattgcggtcactaacctgcgtactcctgacgagatttgattctgtcgatttgacagtcaatctaggtacgacagctaaattcgcggcgcactgaccacgaaatgaccccggtagtgatcaaaaaagttgtggtgaaaaaaaaattatgacagatcatacaacgaccgacagcgcccagcccgcatggcaaacccgcgatcatctcgatgatccggtaataggtgagttgtcgaaccgttttgggccagaggcctttgttgttcaggcgacccgtaccggcatgccggtagtctgggtgaagcgtgaacaattgctggaagtaatgtcgtttttaagaaaacagcctaagccttacgttatgctgttcgatctgcatggggtggatgagcggttgcgtactcaccgccaaggtttgcctgatgcggatttctctgttttctatcatttgctttctattgagcgtaaccgcgacattatgctgaaagtggcactgtctgaaaaagacatgcacgtgtccacagcaaccaagattttcccgaatgccaactggtatgagcgggaaacgtgggaaatgttcggtattacctttgatggccacccgcatttgacgcgcattatgatgccgcaaagctgggaaggtcatccgctgcgtaaagactaccctgctcgcgccacggaattcgatcccttcgtgctgaccaagcagaaagaagatatggagatggagtctctcaccttcaaaccagaagattggggtatgaagcgtggaaccgaaaatgaggacttcatgtttcttaacctcggtcctaaccatccgtcttctcatggtgctttccgcattgtattgcagctggatggcgaagaaattgtcgattgcgtgccagacgtgggttatcaccaccgcggcgcggaaaagatgggcgagcgtcaatcctggcatagctacattccttacactgaccgtatcgagtatctcggtggctgtgtaaacgaaatgccgtatgtgctggccgttgaaaaactggccgggattaaagtgccggagaaggttgataccatccgcgtgatgctgtctgaactgttccgcatcaacagccatctgctgtacatcagtacctttatccaggacgtgggtgcgatgaccccggtgttcttcgcctttaccgaccgtcagaaagtctacgatgtgattgaggcgattaccggcttccgtatgcatccagcctggttccgtattggtggcgtggctcacgatctgccacgcggctgggagcgtttgctgcgcgatttccttgactggatgcccaaacgtctggattcctacgtcaaagctgctttgcagaacagtatcctgaaaggacgttcaattggcgttgctgcatacaattccaaagaagcgttggattggggcgtcactggtgctggcctgcgtgccaccggtatcgattttgatgtgcgtaaatggcgcccgtattccggttatgaaaacttcgaattcgaagtgccaatcggtaataacggtgactgctatgaccgcgtaatgctgaaagtggaagaactgcgtcaaagcctgcgaattctggagcaatgttataaaaacatgccagaaggtccattcaaagctgaccatccgctgactacgccgccgccgaaagaacgtacgcttcaacatatcgaaacgctgattactcacttcctgcaagtttcgtggggcccggtgatgccagctaacgagtcattccagatgattgaagcgaccaaagggatcaacagttactatctgaccagtgacggcagcaccatgagctatcgcacccggatacgtaccccgagctatgcccatttgcagcagatcccatcggtaatccgtggcagcctggtatctgacctgatcgtctatctgggcagtatcgattttgtaatgtctgatgtggaccgctaattatgagtgatcaaaaagagacccaggatcataaagatcaacttgatgtggtgaacctggctgtcgatgcagcgcagtctactgccgttgagcgctctgtcgctgaacagccggccaccgcacaagaagcctttgaattgagcgcggaagaacgcgatgccatcgagcatgaaaagcatcattacgaagatgctcgtgccgcgtcgattgaagcgctgaaaatcgtacagaaaaaacgcggttgggtgccagacggtgcgattcacgctattgctgaggtgctgggtattccggcttccgacgttgaaggcgtagccactttctacagccagattttccgccagccagttggtcgccatgtgattcgttactgtgacagcgtggtttgccacattaccggttatcagggcattcaggcggctatcgagaaaaagctcagcatcaagccgggtcagaccacttttgatggtcgtttcacgctgctgccaacttgctgcttgggtaactgtgaccgtggtccgacgatgatgatcgacgacgatactcacagctacctgaagcctgaagaaattgaaaagttactggagcaatatccatgacaaatccttcaggttttactcgtgaaattatccgtaccccggaaatgcatccgctgacctggcgtttgcgtgatgacaaacagccggtatggcttgatgagtaccgcagcaaaaatggctatgtcggagcagaaaaagccttaaaaggcatggctccgccggacgtcgtcaatctggtcaaagatgcgggtctgaaagggcgcggcggcgcaggtttctccaccggtttaaagtggagcctgatgccgaaagacgaaagcatgaacatccgttacctgctgtgtaacgccgatgaaatggagccgggcacctataaagaccgtctgctgatggagcaattgcctcatctgctggtggaagggatgctgatcagcgccttcgcgctgaaagcctaccggggctacatcttcctgcgtggtgaatacatcgaagcggcggtgcatttgcgtcgcgctattgccgaagcgaccgaagccggtttgctgggcaaaaatattatgggcagcggtttcgatttcgagctgattgtccataccggtgccggtcgttatatctgcggggaagaaaccgcgctgattaactcactggaaggccgccgcgctaacccacgttccaagccgcctttccctgcgtcttccggcgtgtggggcaaaccgacctgcgtcaacaatgtggaaaccctgtgtaacgtgccggcaattttggagcacggcgtggattggtatcagggaatcaccgctggcaaaagtaacgatgcgggtaccaagctgatgggcttctctggtcgggtgaaaaatccgggcctatgggaactgccgtttggtatttctgctcgtgaaattttggaagattacgccggtggtatgcgtgacggtttgaaattcaaagcctggcaaccgggcggtgcgggtaccgacttcctgaccgccgatcatttggatctgcctatggatttcgaaaacatcggcaaagcgggcagtcgtttaggtacggcgttggcaatggcggtggatcacgaaatcggtatggtttcgctggtacgtaatctggaagagttctttgcccgtgagtcatgcggctggtgtactccgtgccgtgacggtctgccgtggagtgtcaaaattctgcgtgcgctggaacgtggcgaaggccaaccgggtgacatcgaaacgctggaacagctttgccgcttcttagggccgggtaaaaccttctgtgctcacgcgccgggcgcggttgaaccactacaaagcgcgattaaatatttccgggacgaatttgaagccgggatcgcgactaaggactatggcaatacccgagccatagccggtattcagcctaacctgttaaaagcgcgctggtagcactgatgcccttgctatctataaatcgttataagtagcaaacagttataagcagcaagggtcagaattttttgattaacgcttgtaaaaagaacggtttcaaggtcgtcgtgagcgacggtcaaacgaggcagaaatcagtaagaaagagcatttcgggctgatttttgacgaagtatcaccgagcgcaacagaccttgaatgtgttctgacgcaagccacttggaagcatgctgatatggctacgattcatgtagacggcaaagaatatgatgtaaacggggccgacaacctgttacaagcctgtctctccctgggactcgatattccttatttttgctggcatccggcgctgggaagcgtcggcgcttgccgccaatgtgcggtaaagcaataccaaaacgccgatgacacccgtgggcgtttggttatgtcctgtatgaccccggccaccgatggcacctttatttccatcgatgacggcgaagcaaagcagttccgcgaaagcgtggttgaatggttaatgactaaccatccacacgattgtccggtctgtgaagaaggcggtaactgtcacctgcaagatatgacggtgatgaccggccacagcttccgtaagtaccgtttcagtaaacgtactcatcagaatcaggatctcggcccgttcatttcccacgaaatgaaccgctgtatcgcctgttaccgctgtgtgcgttactacaaagactatgcagacggcactgatttcggcgtatatggcgcgcatgacaacgtatatttcggtcgtaccgaaagcggcaccttagaaagtgagttctccggtaatctggtagaagtttgcccgaccggcgtattcaccgataaaacccactccgagcgttataaccggaagtgggatatgcagtttgccccaagcatctgccagcagtgcagcgtcggttgtaacaccagcccaggcgagcgctatggcgaactgcgtcgtatcgaaaaccgctataacggcagcgtaaaccactactttatgtgtgaccgtggccgctttggttatggctacgtcaacctgaaagatcgtccgcgtcagccgcagcaacgccgtggcaacgattggatcgctctcaacgccgaacaggccatgcagggggcggcagatatcctgcgtcaggcgaagaaaaccatcggtatcggttcccctcgcgccagtctggaaagcaactttgcgctgcgtgaactggtgggggcagaaaactattacaccggcatcgccgcgggcgagcaacagcgtctgcaattgatgctgaaagtgctgactgagggcggcatccacactccggcgctgcgtgaaattgaaagctatgatgcggtactggttctgggtgaagatttgacccaaaccggcgcgcgcattgcgctgtctgtgcgtcaggctgtgaaaggcaaagcccgtgaaatggccgctgcgcaaaaagttgccgattggcaaatcgccgcgatcatgaacattggccagcatgccaaacatccgctgtttatcactaacgttgataacacccgtatggatgatatcgctgcctggaactaccgtgcgccagtggacgatcaggcacgtttgggctttgctattgcccacgcgctggacgagtccgcgccggcagtggaagacctgtcaaaagatctgaaaggtaaagtggatatcatcgtgcaggcattggccggcgcgagaaaaccgctgattattaccggtagcagcgcgggtagcgatgcaatcatcgaagcggcagccaacatcgccaaggcgctgaaaggccgaggatctgacgtaggcattaccttcgtcgcggcagcagctaatagcatggggctggcgatggtcggcggcggttcgctggatcaggcgttggctcagttagccagcggcgaagctgataccgcaatcgtgatggaaaacgatctttatcgtcatgcggcggcggatcaggttgacgcggcgttagccaaagcggaaaacctgatcgtgttggatcatcagcgcaccactattatggataaagccagtttgattctgtctgcggccagctttgctgaaagcgatggtacgctggtgaatcaggaaggtcgcgcgcagcgtttcttccaggtttacgatccaagctactacgacgaaaacgtggtgatgttggaaagctggcgttggctgcattctctacattcgacctacactagccgccacgtagactggactcagctggatcacgtgattcaggcctgtgtcaaagcattgccgcagttgcagggtatcgtggaagctgcgccagacgcgactttccgtatccgcggtcagaaactggcgcgttcaccgcaccgttacagtggccgtactgcgatgcgcgccaacatcagcgtgcacgaaccgcgtcaaccgcaagacatcgatacgccgtttgccttctcaatggaagggaacaacagtccattggccgatcgtcagcaaattccgtttgcctgggcgccaggttggaactcaccgcaggcgtggaataaattccaggctgaagtgggtggaaaactgcgctttggcgatccgggcgtgcgcctgatcgaagctggggagggcagcctggcttacttcaccggcgtaccggcagcctttgcggcaaataccgacggctggcgtgtggcaccttactaccatctgttcggtagcgaagaaatgtctcagcgttcagcggtgattcaacagcgtatgccagcgccttatgtgatggtcaatccatccgacgcagcgcaactgggggttaacctcggtatgttggtcgagttcaactgttctggtcagacgctgcgtctgccggtgcgtttgagtgaaactttggctcagggtcaggtcggcttgccgcttggcttaccgggcattccacctatattggtgggtacccgcgttgagaacctgcgggaggcggtgctatgagctggtttacccctgaattgatcgagatcctgatctccgtcctgaaagcggtagtgattctgttggtggttgtcacctgcggcgcgtttatgagcttcggcgagcgccgcctgctgggtctgttccagaaccgatacggaccaaaccgtgtcggttggggcggctcactgcagctggtggccgacatgatcaaaatgttcttcaaagaagactgggtaccgcgcttcgcagaccgggtaatttttactctggcaccggttatcgcctttacctcgttgctactgtctttcgctatcgtcccggtcagtccgacctgggcggttgcggacctcaacatcggcattctgtttttcctgatgatggccggtctggcggtgtacgcggtactgttcgccggctggtccagtaataacaaatattctctgttaggggcgatgcgtgcgtcagcacaaaccctgagctacgaagtgttcctcggcttatcgctgatgggcgtggtagcgcaggcaggctcgttcaatatgcaggatattgttaactctcaggaacacgtctggaacgttatcccgcagttctttggcttcgtgacctttgccattgcgggcgttgcggtttgtcaccgtcatccctttgaccaaccggaagcggaacaagagctggccgatggttaccacattgaatattccggtatgaagttcggtttgttcttcgttggcgaatacatcggtatcgtgaccgtctctgcactgatagtcaccttgttcttcggtggctggcaaggcccgttcctgccgccatttatctggtttgcgctgaaaacggctttcttcatggtgatgttcattctgatccgtgcatctttgccgcgcccacgttatgaccaagtgatgtcattcggctggaaaatttgcctgccgttgactctgctgaatctgctggcgactgccgcggtcattttgtacaacgctcaataaggggtgaatgaaccatgacgttgaaagagttagtggttggtttcggcacccaagtgcgcagcctgtggatgattggccttcatgccttccacaagcgtgaaacccaaatgtatccggaagagccggtttacctgccgccgcgctaccgtggccgtatcgtgctaacccgcgatccggacggcgaagagcgctgcgtagcctgtaatctgtgcgccgtggcttgcccggtgggctgtatctctctgcaaaaagctgagcagaaagatggtcgctggtatccggaattcttccgtatcaacttctcccgctgcattttctgcggcctgtgtgaagaagcttgcccaacgaccgctatccagctcacgccggatttcgaaatgggtgagtttaaacggcaggatttggtctacgaaaaagaagatttgttgatctcgggtccgggtaaatatccggaatataacttctaccggatggccggtatggcgattgacggcaagcagaaaggcgaagccgaaaatgaagccaaaccgatcgacgttaaaggtctgatgccttaaaggagccgttgatcatggaatttgcattttatatagcagcattggtagcggtagtggcgacaattcgcgtcattacccataccaacccggtacacgccttgttgtacctgattatctctctactggcgatttccgctgtgttcttctcactgggcgcgtatttcgccggtgcgttggagatcatcgtgtacgccggtgccattatggtgctgttcgtcttcgtggtgatgatgctgaacctgggcaacgtcgatgcgcaagaacgtgcttggctgaaaccgagcgtctggattggccccggtttgctggcgctggtgctgttatcggtactgatttatgccatcagcagcgtatccgatcagggtatcagcggcgagatggttgacgcaaaagccgtaggtatcagcctgtttggtccgtacgtattggcggttgagctggcttcaatgctgttgctggcgggtctggttgttgcgttccacattggccgggaacataaacccggtgatgtgctgagcagcggcgattcagcgaaaagaaaaacggaggaacaagcatgatccctctacaacatggccttattctggcggccattctgtttgtgctagggctgtctgggttgctgatacgccgcaacctactgtttatgttgatcagtttggaagtgatgatcaacgcggcggcgttggcctttgtggtcgcgggcagttattggggtcaggctgacggacaggtgatgtatatcctggcgattacgctggcagcggcggaggccagtattggcctggcattgctgcttcagctgtatcgtcgccgtcatactctggatattgatacagtcagtgagatgcgcggatgaacctattatatttaacaattctgctgccactgcttggttttctgctgttggcattctcccgcggtcgctggtcggaaaatacttccgccaccgtcggagtcggctccattggtctggctgcgctggttaccgcttacgttgcggttgatttcctcagccagaaagccacgggcgttcaggtgtttaaccaaaccctgtggaactggatgtccgttggcgacttcagtattccattgaccctgacgctggacggcctgtcgctgaccatgctgtcggtagtgaccggcgtgggcttcttcatccatatgtatgcctcttggtatatgcgtggggaagaaggctattcccgcttcttcgcttataccaacctgtttatcgccagtatggtggtcttggtattggcggataacctgctgctgatgtatctcggctgggaaggcgtgggtctgtgcagttacctgctgatcggtttctactacaccaatccggcgaatggcgcggcggccatgaaagcctttatcgtgactcgcgtaggtgacgtattcttggcttttgcgctgttcatcctctacaacgaattgggtacgctgaatattcgcgaactgatggtactggcaccgcagcagttggaaatgggctccaccgccattacctgggcgaccttgatgctattgggcggtgcagtaggtaaatcggcgcagttgccgttgcaaacctggctggccgatgcgatggcaggcccgacgccggtttccgcgctgatccatgcggcgaccatggttaccgccggtgtgtatctgattgctcgtactcacggtctgttcctgatggcgccggacgttctgcatctggtgggaattatcggtgcggttacgctggtactggcgggctttgcggcgctggtgcaaaccgacatcaaacgggttctggcttattcgaccatgagccagatcggttacatgttcctggcgctgggcgttcaggcgtgggatgcagccattttccacctgatgactcacgccttcttcaaagccttgctgttcctctcctccggttcagtgattctggcttgtcaccacgagcaaaatatcttcaaaatgggggggctgcgtaaaaaaatccctctggtttatatctgcttcttggtgggcggcgcggcgctggcagcattgccaatcgtcaccgcgggcttctacagtaaagacgaaatcctctggggcgcactggctaccggccatatcaacctgatggttgccggtctggtgggggcgttcctgacggcgctgtataccttccgcatgatctttatcgtgttccacggcgaggaaaaaaccaaagcccatccggttacaggtatgactcataacctgccattgctggtgctgctggtgctgtctacctttgtcggcgcgttgatcacaccaccgttggcgggcgtattgccagaacttcatttaggtgaagaaggcaaaatgccgctggagatcttctccggggtgattgtggtgatcggtattctgctggctgcggcactgtatctgggcaaacgtcagtgggtgaacagcatcgggcaaagcgcgattggccgtttcttcaccgtctggtggttccacgcatggggcttcgattggttgtatcacaacctgtttgtaaaaccttatctgtggattgcacgcttgctacagcgcgatccgctgaactcactgatgaatacgccggcatggattgcacgcttgggtaatcgcggtttgacgttcagtgagaatggtcaggtgcgttggtacgttgcctcaatgggtctgggtgcagttgtcatactggctctgttgcttttcgtttagaagcctgaataggctctttaattagggacacaaaacgccatgctattaccttggctaattcttatcccctttatcggcggtctgctgtgctggcagtttgaacgcttcggtaccaaggtaccgcgctggatagcgttaatcgcgatggggctgacgttggtactttccctgcaactgtggttgcagggcggctattcactgactaatccggcgggcattccgcagtggcagtcggagttctccttgccgtggattccacgctttggcattgagttccatctggcactggacggtctgtcactgctgatggtggtgctgaccggcctgctgggcgtactggcgattctttgttcgtggcgtgaaattcagcgctatcagggtttcttccacctgaacctgctatggattctgggtggcgtcatcggcgtgttcctcgccatcgacatgttcctgttcttcttcttctgggaaatgatgttggtgccgatgtacttcctgattgccttgtggggtcacaaagcgtcagacggtaaaacgcgtatctccgccgcgaccaagttcttcatttatacccaggccagcggcctgatcatgttgattgctatcctgggtctggtatttgtgcattacaaagccaccggcgtctggactttcaactatgaaaatctactgaaaacgccgatgtcccacggtgtggaatatctgttgatgctcggtttcttcatcgctttcgcggtgaaaatgccggtggtgccgctgcacggctggttgccggatgcgcacagtcaggctccaaccgcgggttcggtggatttggccgggattctgttgaaaaccgctgcttacggtttgctgcgctttagcctgccgctgttcccgaatgcttcccacgagtttgcgcctatcgctatgtggctgggtgttattggtatcttctacggtgcgtggatggcgttctgccagaccgatatcaaacgtttaatcgcttacaccagcgtgtcccacatgggctttgtattgattgccatctacaccggcagccagttggcttatcagggcgcagtgattcagatgattgcccacggcttgtcagccgcgggtatgttcatcatctgtggtcaattatacgaacgtctgcatacccgcgatatgcgtcagatgggcggcctgtggggacggattaagtacctaccagcgctttccctgttcttcgcggttgcgacgctggggatgcctggcaccggtaatttcgtcggcgaatttatgattttgtttggcagcttccaggtcgtaccggtgattactatcatctctacctttgggctggtgtttgcgtcgatttattcattaatcatgatgcagcgcgcttactatggtgcgccgaaatcggaagaagccttgccgggtatgagcctgcgagaactgtcgatcgtgttgctgctggtggtattactggtgttgttgggcctttacccgcaaccgattctggatacctctcatgcggcgatgagcaatgtacagcagtggtttaacgcttcatcaccactagtttcaccaaacataacaacaaggccgtaattcgccatgacaataactcctcaacaactgatcgcaatgctaccgctgttgatcgtcggattgacggtggtggttgtgatgctgtccattgcgtggcgacgcgatcatttcctgaacgccaccctgacggttatcgggcttaacctggcgctgctgtctctgtatttcgtcgggcaagtcgagccaatggatgtcacgccgctgatgcgggttgacggctacgcgatgttctataccgggctggtgattatcgccagtctggccacggcgacctttgcctatccgtggttggcagggtatccggataaccgcgaagaattctacctactggtgctgattgccaccttgggcggcattctgttagccagtgccaatcatttggcttcgctgttcctgggtatcgaactggtttctctgccgctgtttggtctgattggctatgcctatcgccagaagcgttcactggaagccagtattaagtatatgttgctgtctgcggccgcatcgtccttcctactgttcggtatggcgctgttgtatgcggaatccggtagcctgtccttcgccggtctgggtaaaagcctgagcgattctgttatccatcaaccgctgattctggccggtttggggatgatgatcgtcggtctgggcttcaaactgtcgctggttcctttccagctgtggacgccagatgtgtatcagggggcgcctgcgccggtttccaccttcttggctactgccagtaagatcgccatcttcgccgtagtgatgcgtctgtttatgtatgctccagcggcggacagcgaagtggttcgtctggtactctcgatcatcgccgttgcctctattctgtttggtaacctgatggcgatcagccagagcaatatcaaacgtctgttgggttactcttccattgcgcacctcggttacttgctgattgcgttggtggcggtgcagactcatcagttggcgctggaaaccgtcggtgtttacatggccggttacctgttcagcagtctgggcgctttcggcgtcgttagcctgatgtccagcccgtataaagggccggatgcggaatccctgttctcttatcgcggtctgttctggcataaaccgattctgtctgcggtaatgacggtgatgatgctgtctctggccggtatcccgatgacgctgggctttattggtaagttcttcgttattgcgatgggcgttagcgctaacctgtggtggctgaccggtgctgtagtactggggagcgccattggcctttattactacctacgcgtcaccgtgagcctgttcctcagcccaccggagaaactggtgcgcgatactccaagcaactgggccttaactgccggtggcgttgtggtgttgatttctgcgattctggtactgttcctcggtatctacccgcagccgttgattacgctggtacaaatggctcagccgatgttctgagtccggcaataatccgccaaacggtgggttaacatgctgagataaaaccccttgccgaatttctggcaaggggttttgctttttggggggaatgtctacatctcgtcgataaattaaaacctgattgggttttcccgatggccgaaggctgagaaataacagtctcttaatttttctgtttcagagagttggctggcgggtgtacggcaggtgccctgcctcgaacggagttttctgctagagaattcaggacagaagagggcacgctaaccgatgcggccaaacctaggtaccgccgagataaaatgacgttaaatcatgtttattaatattcttatgccagaatatggtcgtatttgatcagcaatctttatttttcggataaagaatggaatgtgttttcgaggctattgatcaccgcacgcacgcgtgctgcccgttgtacgtctggatgtaaaaccagccagatatccacgggatcctgccgttcaggccagattcgtaccagatcctcatcgttatccgccagaaaacaggaaagcagcgcaatgcctaaccctttttgcgtggcggaacgcagtaatatttgcgagttgctttgcaagacgacattgggttgaaccagcgtttcaccgcataaactttgccagtggcgaggaacgtcttgttgagggaacagcaagagatcgtgaccgcgaaagtgttcgccgggtcgagggacgcctcgcacagcaatatattcatgggcggcatataaacccatattgatcgtcgccagccgcttaatgattaactcattattttcaggtctatcgccgcgaatggccagatcggcgccgtgatgcgccatattggtgatgttaatgctggttgcgacgctataactgatatctggatgctgctgacgtagcaatttcaacgcgggaagaacaaatacttcggccagcgtatccgtggtgacaagagaaaccgtgccctgtaaccggtcgtcgccgttggccgctttacgattaatcgcctctgccgccctttccatagcaacagcatcggttagaagctgctcacccaataagctaagagtgaaatgttttggtgtgcgaataaatagctttgaatttaaggcatgttccaacgctgaaattctacgcccgacggtagcctgatcgacatgtagctcacgcgctgcctggcgcagagttccggcacgcgccacggcgagaaagaatcgtgcgtcatcccagttcatcaacttttcctttcggtatcagttcgtttatgcctgtaagtttaatgtataaatgcatcaagatgatgcatttatgtctgttttgatgcaattttgcaggcgtataatccagagcttcttttgttgtctgtgacaaggtattcccttgttgtttcaccgttttaggagccatttatgtctgtgggagttgcccctgctgcccgttatttcccggtgctgtgctttctggcgttggcgctgactgcggcattactgaatagcagcgcgccaacgccgctttacccgctctatcagcagcaactggggctcaattcggtcagtttgacaatggtgtacgccgcttatgccgctggcgtgttgatttcgctattggcggtagggaatttagcgggaaagattcgggaccttcgaatgatgattgtgcctgctctggtcacggtactggctggagcctggctgtttgctattgctgatacttttggtcgcctgtttgtggcgcgattgctggctggaattggcactggcgcgctaaccggtgcggcgaacctggcgctgatccgtttttgtccgccggatggcggcaagcgggcggcgttaattgccacgctttcttttaccgctgggttggccttggggccgatatttagtggtgtagcgttacaaacccattttcatcctacggtgctcccttttattttgattattgctatggccgcgttggcagcggcaggactcacattgggctggccggaaacacgcgccttgcggcataagaacataaagctaacttgcggggccagtggtgcagtgaaacctgccggcggtttactcagtggtctcaccgctacgggaatgcggtttttcttatgcgccggtgcactgtttgtctcttgggtggttgccgccagtattctggctatcggcccggcgattgcaaagcaactgttgtatttaccggggcaaggcggatttggctatgtgattgcggtctatctgctgattgcgggtatctgtcagttggtcagccgtagtattcctagccgtatttccctgtataccggctgtctggctcaggcggttgcggtgatgacctttgccgctgcgttgtattttcattcattgcttttgggtggcatcggcatggtcgtgaccggctacgcctttggcgccatctttgtcggcagtgccgcgttggtgaatttaatttcacctaaagccagccatgcccccttgctgtcgttattttatgtgatcgcatacaccgctaactgggttcccgttgcattgggatggatgatagatcgccacggattattatcagcagctaatcttctgttctgtctgagttcgccggtttgtttgttgctggcatgggggataaaacgcgccgcgttcttcgctcatgagtgatgttttgtgattcaagtcacgatatgatttattttattgcattgttaccataataagcgtgatttgaatcgctatgaaattcaccgattcgggtaaaatgcgctcattgctacctcccgtttattgaaccgaactttatcgcgagtgaatcctgatgaacattatcctgatgattgctatcactaccggcgtgctttccggcatttggggctgggttgctgtcaccttgggtttgctcagttgggcgggttttttgggctgtaccgcttatttcgcctgcccacagggtggaataaaaggattgattatcagtttgctgacctgcgctagcggcatcttttgggcaatgatgattattcagggcagcgcattacggccagagtggacgatacttggctacctgttgaccggcgtcgtcgcatttttaatgtgcattcaggcctgccagcaatggctgtcttttgtacctggaacctttatcggcgcctgcgcgacttttgccggtggcggcgattggaagctagtttcagcctcattattagttggattgatatttggctatgccatgaagaacagcgggctatggctggcggcgaaaagagagaaactaaagaatgaagacaagcagccaagggcaatggatatcgagccagaaagctgaaaagtcggtcatcggggcagttaaaacaaaagggcgactatccgccctttttgctggaatttacagtaaatgatttgcgactttgatcaccagtttacgcagtggtgccggttcgcttaaggttcccatcgggcggtgaagttctcctgggaatagcatcaccacatcgccgggtgtcagcgtcagcagggtttcttgcgtgataccttcgaacaggccgtaatctttctcgcaatcaaaatccatagtagggcgctgcccttgcgtaccctgcgccgccccaatcacttcgcttccttccagcagaatatgcaaatcaatgtaataacggtgcaattcaggcagttgctgagccaggggcttagtctgaccgataatatgattgagatagatttcgcggccttccagatccaattccccagcgggtagagccgctaaatccatctggcagaggcgggtcagcgtgcggcgaataaccgccggataaagcgggttattggcggcactcttcagttcatccaatatcataataagccttcttttttagtaatgtgaaattcaggcgtggcagtgggcggtgtcggcctgctctaatgctgtgatgcagttttgcacgacgccagccaacggcggggtgatatcaattttgatgatgtcccgctccgtggcgtctggggcttccagagtggcaaactggctctgtaatagactttccggcataaaatgtccggcgcgctgccgcattctggccagcaccagcgaataatcgccggttaaccatagaaattgaatatcctgattgccagcgcgtagtcggtcacgatactgctttttcagagaggaacagactaaaaaaccggtttcatttttctgttgcaggctgtaagccacgtcactcaaacgttctagccagggagcgcgatcctgatcgttgagcggctggcccgaggccattttctggatattggcgcgtgggtgtaaatcgtcaccatcgatgaatttggcattcagccgtaaggccagcgcctgaccgacgcaggatttaccggttcctgcaacgcccataacaataatgcatttgcctgtcatcattttcccctgtcactcattcccagtggcttaggcaccaccgcaagtcacattcactgaggccagtcggcttaaaccgcgaccagcataccgccgtcgatgaaaagtaaatgaccgttgacgaaatcggaggctttggacgacaggtaaaccgccgcgccaattagttcttccggatttccccaacgggcggcaggagtgcgtttacacagccagtcggtaaaggctttgtcttccaccaaggctttagtcatatcggttttgaaatatcccggagcaatgccattcacctgaatattatgacgagccaactccacgcacatgccgcgggtcagcattttcactgcgcctttagacgctgcgtaaggcgtaatagtgtcgcggcctaattcactttgcattgagcaaatattaatgatttttccgctttggcgtttgaccatataacgagaaacggcctgagaaaccagaaatactgatttttggttgaccgcaatgacgtcatcccagtctttttccggaaattcggtaaaagcatgacggcgttgaattccggcattattaattaatatatcgatagcacctatctgattttctatttgctcaatggcctgattcaccgcatcgtggtcggtgacgttaaaggctgcggcgtgggcaatgaaaccggcgtcacgcagctgcgccacggcgctttcagcgcgctccgtagtaatatcgttaataattatctcagcaccaaattcggctaaccctttagctaataaaaaaccaatgccttgggcggaaccggtgattaacaccttacgattttccaatgagaataagtttttcatggtgcattcctgatagcgccgtgagcgcgattattcggtaaagggtttcgccaacggcgaggttgagtaaccggttttatttttctggtaaatagacagaaagtttttgttaaattatccgtagccgtgaataagttgatttatataaatcaacgcggcctgccttcaggcgacattattattcacagttcggtattgttttagctcagtattgttatttgacctgaaaattgaattcctttcatttgaccaaggtatttatttatctggtgatggtttgaaatctgtcatcatcaaaccgttttttagcagggtaaaccgtgattaagatcactttaaattatgttacgccgagctgttactctttacgtgagctttatcccttttggctaaacaaaaaggctggaaagataaggattgaggaagggaagatggtgggtaatgaaactaacctattgataaaacgttggcttaataataaaaatcctatctgttatgccattttaagccagtaacatgcttttcattaccccagctaacagggcataatcgattcaactccattcgccttattccgtcaggtatctcccatgaaaaatcagcgtgttacgttacaagacattgcgttactggcaggagtgacgaaaatgaccgttagccgttacctgcgcacgccgaaaaaggtcgcgcctgagaccgctgcccgcattgcgcaggtcatggttgaagtgaactatgccgatggtcatgaaggcgaggggcgcgctaaccagcataatcctcgcatcggtattttggtaccttcctttaataaccagattttttccgatttactggcgggtattgaatctgtcaccgccggaaatagctatcaaacgttggtggttaactataactataataaagatcgtgaagaagaacagatcatcaacctgctttcctgccagatatccggcctgattttgactgattctgaacatactttacgtgcagataaatatttgaatgctgctgaaattcctattgcgcaggtgatggatttagagcctcaacctaatcgaattacagttggttttaataattatcaggccgcctatgatatgacttccacgctcattgccagtggtaaacagcatattgtctggtttggttcgatgtcggatgtacgtgatcgtaaacgttatcagggatacagccaggcgatggaagacgcgcagctatcacctttgcatatcactcctaacaaagtgtcatcggtatctataggttctggcatgttggcattggcgcgacaaatgtatccgcagatggatgcgatcttttgtactaacgatgatatggcggttggcgtgttacaggaatgcctgaagctgggtatcgcgataccggctgaaatggcgatttccggctttcacgggttggatattggtcaggcaactacgcccgttttggccagcgtgactactccgcgctatgaaatgggtaaagtagccgcagaaatcttaatcaagaaaatcaaaagtattcctactatcgaacaggtggatcttcattatcgcatttctctgggtgggactatttgatatccgcgataatcattgctgcctgaacccgttaaatgctttcagtccgaatcatgtccgataaccgtgggtatgtagtggtatcgccacgttggttattggctactgattatctggcaattgataatattgcaagcgaataaattgatttatggttaaaggaattcgttgaatggaaatattataccgacgcaatgatagccagctcacgttgcaggtaacacgttttcttaacatgatttacagtgaccagtatcacaaaataaagtattgaaaaaaggttttataacggcatcgacaaaataaacggaacagaaagaaattagccgtggatgattaaaaacattaagaacagcgatgtaattaaatcatccaatcattgtttaataatggctaactgcttcggttattttttattttattttactgtcaggtgctcaatgatgaaaaaaaaccaaccggccgtgctgattattgctccagtaatggattatctgaccgataaactggacgctaactttaccgttcataaactgtatctattggatgatgccgccagttttctgcgtgaacagggagggaatatcaaaggtgtggtaacccgcggtgatattggaataagcaatgaagttatggcgcaactgattaatttagagattatctcaatctttggcgtcggtactgatgccgtcgatttggaatatactcgcgagcgaaatattattgtgaccaatacgccgggcgtgctgactgatgacgtcgcagacaccgctttggggctgattatcaccacctgccgccgtttctgtcaggccgataaattcctgcgtgctgggcagtggccgaaaagcagtttgccgctgtcgacaaaagtaaccggcaagcgcctggggatttttggcatgggacgcataggccgcgctattgcgcgccgtgccgccggtttcgacatgcaaattgcctataccgataatactcacgatcgtgaattgccttatcagtttgtgcccgacctgatcgatttagcgcgtcaaagcgatattttggtgattgccatttccggagggaaagacagcggcggtctgattgatgccaaagtgtttgccgccatgccggaacatgccattctgattaatattgcccgtggcaatatggtgaatcaggatgatctgattgcggcgctacagcaaaaaactatcggcggagccggattggatgtgttcgctaacgaacctcatgtgccgcaggcattaatcgagttggaaaacgtggtgctattgccacatattgccagcgccaccgttgaaacgcgtatgcaaatgagcgacatggtattttctaatatctctgcttatttctctgagcaaccggtaccgacggcgattaagtattcattagtttgagttgattcgtatcagggttaattaatttagccctctcgaaataataataaaaataaattatcacatcgtgcattttaaaataactggcaaattaattctaatttgctgacggtattctctgcgccagccatccgaatcgcagagtaaatattgctatagaagaggcgtgttcaatatggacagtaagattcctaatgcccgttggttccgcattattgttcccatcatgattgcctgtattatttcctttatggaccgggttaatatcagcttcgcattacccggtggaatggaaagcgatctgggtattaccagccagatggctggtttagccggcggcatcttctttattggttatttatttctgcaagtccctggagggcgtattgcggtacacggcagcgggcgtaaatttatcgcttattccctgtgcgcctgggcggtcgtatccattctgaccggatttgtgaccaatcattatcagttattattcctacgctttgttctgggcgtctctgaaggcggcatgttgccagtggtactgaccatggtgagtaattggtttcccgagcgtgaaattggccgagctaacgcttttgtgatgatgtttgcacctatcggcggcatgttcaccgcgccgctttctggctatatcattaatatattggactggcgctggttatttattctggaaggcacgctatccgctattgtattagtgatgtggtggtttgtgattagcgatcgcccggaagaggctaagtggctctctgaaaaagagcgcgattatctggtgactgaattagcccgtgaacgcgccgaaaagatgcataataaactggtcacccatgcgccgctgaaagccgtatttcagaataaaggtctaatgaaactggtggcacttaatttcttttaccaaaccggtgattatggttataccctgtggttacctaccatattaaaaaatctgaccggtggaaatatggcgtcggttggcgtattagccatattgccttttattgcgacaactttaggtatttacgctatttcctatctatcggataaaaccggtaagcgccgtttgtttattatgctttccctgttctgttttgccgctggattaatcacgtcggtcatattccgccataacgtgatggtgtcctatctgtccctggtgttctgcggtttcttccttaaagccgcgaccagcccgttctggtctatccccggccgaattgctattccggaagtggccggtggggcgcgtggagtgattaatggtttaggtaatttggggggattctgcggcccgtatctggtgggcgtcgtgatgtttttctacggtcaaagcgcggcggtttgcatgctggcggggtcgctggtcattgccggtttgattacgctatccctgccaaaagactgcgatttgaatgtggctcccaaggaaaaaaaacctgtcgatagcgcgttagctaaagtgaaaaccgtttgaatcaggcggattgggcgctgagagtgcccaacctgctgccggagatgactatgaacttatcccaacaaattgccttatgtcagcaacacttacaggtactgcagttttcccatttcaaccatcagctagcctggtcgctaggcgaaagcatcaggcaacgcgccgagcggcaacatcttgcgctggcgatagaaatcaatgtgaatcatcagtgtattttcagttatgccatggcaggaaccacgccggaaaatcaggactggctgcgccggaaacggaatgtggtggagttactgaatatcagctcttacgaggccgggctgatgttgcaacagcggcaaaccacgcttagcgagcgctacggcgttaatccacgggattatgccgcactgggtggtggttttcccttgcagattaggcaatcgggcgtgattggcagcatcaatgtatcgggcgccccgcatctggatgatcatgagttcctcctgctgacgctatctgagtttatcggtttgcctgcgggcagcgtggaatccctccgcgagctggacaatacgctatgacgataaatccaacggtggaacgagttactcagcgaattgccgctcgctctctggctacccgaagcgcctatttgcagcgcatagcggcggcaaaggagtgccgagtacgccgttctctgctgggctgtggcaatctggctcacggttttgcagcctgccagccggaggataaaactgcgctaaaaaatcagctaagcagcgatatcgccattattacgtcttataacgatatgttgtccgcccatcaaccttatgccgattacccgagtcagatcaaagctgctttgcatcaggtgggtgcggtggggcaggtggcgggtggcgtaccggcgatgtgtgatggcgtcactcaagggcaggatggcatggagctttccctgatgagccgggatgtgattgccatgtctgctgccgtggggctttctcacaatatgttcgatggcgcactgtatctgggggtgtgcgataaaattgtgcctggtctgctgatggcggcgttgtcttttggtcatctgccagcgatttttgtcccggcggggccgatgggaagcggtttaccgaataaagagaaagtgcgtattcgccagctctacgccgaggggaaaacggatagacaggctctgttggaagttgaggcggcgtcttatcacggtgccggtacctgtaccttttatggtactgctaattccaatcagatggtgatggaggttatggggctgcatttgcctggggcgtcttttatccagccggacgatcctttgcgcgaagccttgaccgcagcggcggcacggcaaattacgcgactaaccgaagtcagcgggcagtatttaccattgggaaaattggtggatgaaaaggttatcgtcaacggcattgtggctttgttagcgaccggcgggtcgacaaaccacaccttgcatttggtggctatggcgcgggcggcggggatcatcattaattgggatgatttctccgatttgtcgaactgtattcctcagctttgccgaatttatcccaatggcccggcggatattaatcattttcaggctgcaggtggcgtcgcgcttttagtgcgggaactactgcagggcggtttgctgcatcctgacgttgaaaccgtggcgggctttggcctacggcgttatacccaagagccttatctctccgcgggagaactgttttggcgtgaaggcgtggcaaaatctctggatcgagcggtgattgctgacttattgcagcctttcgccattcacggtggtaccaaggtgatgagcggtaatctgggaagaggggtgatgaaaacctcggcggttcctgcggaatatcaggttattgaagggccagcgctagtatttgatagtcagcatcaggtacagcctgcctttgatgcgggattgctcaatcaggattgcgtggtggtggtgcgttatcaagggccaaaagcggtaggaatgccggaattacataaattgatgccaccgctgggcgtgttattggatcgcggctttaaagtggctttggtgaccgatggtcgattgtctggcgcatccgggaaagtccctgcggcgattcacgttacgccggaggcctactgtggcggactgttggcaaaaatccgcagcggcgatcgagtacgagtgaacgggcataccggtgagctaacgctgttggtcgatgaatccgagttggagagacgccaacccgaggagccagatttatcccgctttcatcttggctgcgggcgcgagctgttcggtgcgttacgggaaagcttatccggtgccgagcagggagcctgttgtattcgattttagcaataaaaaacggcgagtgcgcgttatcaccttcgccgttttgccgtggtcgcagctgattgcccgtcacgcatggcgagcgttaacggattgttattcaatgcgaaacagctttatctctgtcctgatgcggttattttgtgattttgcgttttcggcctaatacaaaaatcagcgcgattaacaccaatacgcccacaaccatagccggggccatataaggctgtagtttcgccagcagcggaaccggcccaccggcgcgcaactcagcgacatcagcctcgctaacgctcacctgcggattgccgtaattctgtaaaacgtaattggcaatcaacgcaatctctttgtcattcaaataattgacgtaggattccgggccaaagttaggcatcaacacatgttcatttcccacttttcgatcgacaccgaataacatggcagaaatcaggttcgccggattgctggaaccggtagcggtgttattgaacagggatggataagcctgatttttgctgccgctaccgtccggttgatgacaactggcgcagttaccgctaaataatgccgcaccggtatcctgcgtatgattggcggtcgccggatgcaggccgcgcaatccttcctccacattaaccggttggccaaactggtctgccgcctgcctatccagcgggtcgcgtaccggcttggtacttttcaggtaaaccgcaatcgccagcaggtcttctttgggtaaatattgcaggctgttttgtaccgcttccgccatgccacccgccgcctgatttttacccttggtacgaccggtagccaaatattccacgagctgctcattgctccagccgccaataccactcactggatctgaagtaatatttggcgcataccaaggcccaaccatgccaccggcgaaagctttgccgtggttttcgcccatcagcagattacgaggcgtatggcaggtgtcacagtggccggggccgttcaccagataagcgccgcgattccattgttcactttggctagcgtcaggttcaaaacggcctttgtcgaggaacatcatgttccagccgatcatggcaaagcgcatattgaacgggaaaggcaattccgtcgggatattttcctcatccaccgctgcaacgccgtgcataaagtaggcgtacagcgccttaatatcctcgccgctcaggcgtgtgtaggaggtataaggcatggcgggatacaaatgactaccgtcagaccgaatgccgtcgcgtactgctcgggcgaactgttcttcggtgtagttgccaataccggcagctttggacggcgtgatattggtggagtaaatcacgcccatcggcgagctgataccgtagccgccagcgtaaggtgtaccgccttcgggcttggtgtggcaagcctgacagtcagaggcaatggcgacttgctcgcccttgtgaatccattcctgctggctgagagaagcattgtccgctgccagcgccgctgcgctgatgaaagagagagaaagcaagaaagcgccgattcgttttttcatcatttgcccgccattgaacgagccatatcgtcggctgctttcaaacccagcgccgccatagtcagggtgctatttaccacgctggcagagggaatggcgctaccgcccggtaaccataggttggcgtgatcgaaggttcgacagtttccatccactaccgaatccttcggatcgctgcccataattgttccacccataatatggttgttggcattcagactggtggtgattttgaattcatcggcttcaaacagttggccgatatgctccagctgtttgtgcgcggcctcggcaccctgacgtacgtagtcaccgacatcgtaataaatatccgggcacggcaagccgtgggcatctgtgcgggttttgctcagtgtcagacggttttccggatcgggcagcggttccaggctgatcgacaaatcagcgccgtaagccgctcggcggcggatttcctcatccagttccttgccgactaggcccatctccagcgcttgctgagtcgcaggcaaaacccggttgatattgttgagaatcatcttgttagccgaataatctttacggaactcgccgtcccgtgggccaaccaggcaactgctttgcgccgggccgcggcctagccacagcggttctttggccaaaaacgtacagtgaaaaccggagtggtccatcatgttgcggccgacctgatcggaagagttggcgataccgttcgggtttttctcattcgccgcgatcagcagtagtcggggcgtttcaatcccgttacaggctaatgcgaaggttttccccgtggctttatgagattgtttctggttatccagccagtgtacggcggtaacctgattatcctcatcggtatcaattttgtagaccaccgcttccgccagtaccgccgcgcctttcatttctgcgcgttcgatgtgatggataccgttatacatggcaccaattgggcagatcggttggcagttattgttaccgcagcaggtcgggcggccttcccacgggcgggtactgcgtccctgcggaatgggcaccgaattatagccgtgagggttaaccacttcggcaaagcgagtatcgccgtaagcccaaggcacactatccatcggataaggtttactgcgttcagacggagattgtttagccggatcgttcggcccggctacgccaatttcgtcttctgcacggcaatagtagggttccagttcgtcataagaaatcggccaatcgcgccccacgtcgtatagcgttttcatctggaaatcgttgggaacgtgacgccagcaagatgcggcccaatgccaagtggtgccgccgacggtgcgtaaataaccttgtttaaagctaccggcgcttgggccgctgagttcgacgtaattattttccgggaaatacagcggcgcggtggcatattttgactgcggataaagcccttgataatccgagccagtacggttatcaaacggcatattacgccagttttctacggcctgaccgcggctgatgcgcagaccggcttccaatactaataccgagtagccttggctgactaattggtcggccatcatgccaccgacaataccggagccaacgatgataacgtcggcagaggcgtcaccattggcgctgaaaataggttttttcattaggaatggctcacattgtcaggcttaggcaaattgatatcaggtggggcggcggtccaccacagcggaccgttaccgcagtaggttggcacgatcaggccatcgctggcagggcggtacatcagcgcatctttgtaggcgattaacaccgcctgctggccgtgtcctacggtgccggtgtaccaggctgccatgatgttactgaccactttttgcagattatggccactagccgcagccaacagttgctgggcgcgttgttctggctgcatcaatgtggtgagctggattatttggtcggcaaactgggcgtcactgttgtgtagtgcggtaaaaatccgtgccgacataccttgatcgatatctttatgttcggtcagtgcctgagacaatttgaagaagcgagcgaaagccagtgggttggcagcggcggtggcctgttcggctttagtcaaaaatgggtaacctaaaagtgaggttgccaccatcgcggaggccacgccaaacagcagttcccggcgggtgaaaccggttccatttttttccggctcaataacattgcgagatgaaatcttttccatcgagagtctctcttggatcgggtgtggtgctgaacgtcagctttgaaaatgaattattgttattttatgtagcgtttttttagaggttatatggccgcagagtgggcaaatacagtgtgagagtgtcattcaccaaggaaatcatcactcttcaatgagcggtaaattaacaagctattaaacaattttcaataagattgattaggtgtctaactatttgttgataatttgcacggtttttaacaatcctaattcgtggcgcgtcggtgagggaatttagtgccaatcttcatcaggatcaaaatggtaagcccgattataagctatggttagtagggaaaggttatagggtgtaattgattttttaatcacggagaagtcacatgagcagagtaaatgaccctcaacaaacctcgttagatgacgacttgagcatgttgaccgacacgctggaagaggtgttgcggtcatccggcgatatgggtgacgatggttatcagattgtgaaagcccgggctgaaaatgcgctgaaagcagtaagagatcgcctgaatggcaccactgattgctatatggaacgcgccaagcaggcggcctgtcgtaccaatgaatacgtgcgcgaaaaaccctggcacggcgtgggtatcggcgctaccgttggcctgatcgtcggattgttattggctcgtcgctagcgataaatctgatggagtgactcaacggctcatttatgtatgagccgttttttttggccagcatattgcgttttttcagtcagaaatccacggaaatagttacgtgtgcgactaatgattagtttttcatgtgttatttttaccagggcaacataaatcatattactattatcatcttatgtatttaggtttgtttaatttcatctataacaatgattaataggtttgtggcgattatataaactaaatattgtaatttattaagacgctgtaattcataggtatgagtttatttttaaaatgtattatttttttctagcggatgagccgttttgttttctttaaaattaatagatatttttattggctcataacctactgatcagttggaggaattcggaatcgtcaattattttgcgattttaaaagtgtgatgagcgtcacgctaaatggaaaaaacaaaaaaacgtatttgaaggcttgagtatataaactaaccttaatcttacttccggaatactaatgaaatggcaattaatgtattcactggaaatgttgaattaattttattatctctatgtaaatattgattttttctttactttctcatgtggttcaggggctggtcttcgctaattttttttcacccataatattttcttttgttttgttgacgttttcactcttatttattcttgtaattaaaatagagattttatttttgactttaaatcttgggtcggtgttgattgccgatatcgagacgtagcaatgcagtttgttttatttttttattttacacacagcgctttatctaaagcgaaaaactaatgttggaaggatatatattatgccgaaacaaatattaattaaagtgtctcaggaatttagcgatttctgtaaaagcaataatttctcacttgctgcattccgtggagcaagtgccagtaatactaatggggttccggttgtttggtttaacgtggctaataccaatattgttccgaataatccgataaacgttacttttgatccttcttatcaggtttatgactctttggtggatcaggtaattcctgatggcagtgttaccgtagggcaatccatgtcggcgaaactaagcgacagctttggtattgtggccaaacagctaacaaaactgtccggtggtggtattcctacggggatccgtatcatcaaccaaactcccggggtgaatattgtggccggtctggcaggggataatggcgtacctattgcagcctttgtgtgtaatccgaatgttaatttattcctggagcccttacagaccgtaacgatttcgctaatcggatcagcctttggcgttggtactgcgattgttaaagcgaccgggccatcggtattattggatcttaccagcaataatgtggccaacattgaatataatgttttaatgggcgaatgggacttatctgtaggttcaccgactgtacctttaactcaaattcctgcggatacggcaatgcagccatttgtattgccaggaatgaacagtgtaaaactaaaacagttagcgtctctgaatgccgaggcagtgaaataacgtaatggatattgaaaatcactgaatacccgcttctggcgggtatttttttagggataatcttagcttaatgtaggccaatgttgtttatggcatccgcggtatccggtgctaagtgtgtaatagaacttcttttctgatgttcactccgtataatcacattctttatgttgatataccgaggtgcgcgtgacacaactctctgatttgctggaagaattacggcaccttttggatgctgactttcccgatcgggccggtgtccgacagatcgctttgccagcccctgccgtgcttggcagtcaattgctggaatggttggcaacgcagcctgtttttccgcagttttactggcgtcaccgcgatggacatgaagaggctgcggtatgtggtcaggtgcgtttattccgtgatatgtctgccgccgatgaatttatccggcaatataaaaatcatgccggattacgtatttgggggctgaatgcctttgaaccctttccggctatcgccaatgaaacagacatttcctccgctttcttttttctaccgcgattgcaattgctgcgtcgcggtggagaaattagcctgacgctcaatttagccagtgaaacctccctgcaacaggatgtttgtctggcgctggatttcatcgagcaattactcgctccgcggccaattcctgaactgacggtcagcgttgaaactcttgttcaccagcccgatcaaaaaggctggtgccaactgctggaacaggcattacgggccattgccaaccagcagatggaaaaagtggtactggcgcgcatgactcatctgaccctgcgggaaaccttattcagcccggcatttatggccgccagtcgtcaggttaatcaccagtgtttccactttatgctgcgttttgacgatcggcgggcgtttctgggctccagtccggaacgtctgtatcgccgtcagcaatcacagttggaaaccgaggcgctggcgggaaccgtggcgaatgataaggatgatgccaaagccgcgtgcttagcccattggttagccggtgacgataagaatcagcgggaaaacctgctggtggtagacgatatctgccagcgcctgcaaggcggggtttcagcggtggatgtgatgcctgccgaggtgattcgtctgcgcaaagtgcagcatttgcgccgtcggattcgggcgcaattacagccgaatgtcactgatgccgattgtctacagcgtttgcagcccacggcagcagtggcgggattgccacgtgaaccggcgcggttgtttatcctcgatgcagagccgttttctcgcggctggtacgccggttcctcaggctatttttcattggcgcaatcggaattcgcggtggcgctgcgctcggcgcaaatcgagggcgatcaggttcagatttatgctggcgctggcatcgtcgccggttctgacccattaatggaatggcaggaaatcgaaaataaatccgctggattacgcagtctgttggaaaaataagcccttagtcgataaccactaactaatagtgggtaattacccctaccgcctatgagggcggattgtggcgttgattcggcaggtgtaaactatatcgccgttattcatcggtaaaactttggcctagcgcagggcttttccttcgctgccgagtaaaaatatttatttaggctatcagcctgttaactgactgttgagcgaaccatgtcgacaagcgtctttaaccgccgttgggcggccttgctactggaggcattgacccgccacggtgtgcgtcatatctgcattgccccagggtctcgctctacgcccttaacgctggctgcggcggcgaatccgtcgctggtttgccatacccattttgatgaacgcggtttggggcatttggcgctagggctggctaaggcttcggctcagccggtggcggtgattgtcacttccggtacggcggcggccaatttgtatcccgcgctgatagaagccgggctgaccggcgagcgtctggtctttctgacggcggatcgcccgccagaactaattgactgcggcgcaaatcaggcgattcgtcagcccggtatgttcgccagccatcccaatgcgagtctcaatctgccgcgccctacgccggatattcccgcaagttggctggtttccagcctggataacgcgatggcgcagttacagcaaggggcattgcatatcaattgtccttttgccgagccattgtacggcggtgatgatagccaatatgccgaatggtccgcggcgctgggagactggtgggaacgccgcgagccttggttaaaatcctcatatcctgttagccatgccgttcagtctgattggtatttctggcgccaaaaacgcggcgttgttattgccggacgcatgagcgcagaagaaggtattcaggttgctgagtgggcgcagcaattgggctggccgctattgggggatgtgctatctcaaaccggccagccgctgccctgtgcggatttatggctagggcatccgcaggcgcaaaaactgttacagcagacgcaggtggtggtgcaattcggcagcagcctgacgggcaaacagttattgcaatggcaggctcagtgtcaaccggaagaatactggctggtggatcatttagcgggtcgcctcgatccggctaaccaccgcgggcggcggttgttagccaatatcgacgaatggttggagctacatccggcgcagccgcgagccccttgggccggagagctggctttgtggtccgacagcgccgaaggctgcgtggcagaatatctgaacgacaaatttggtgaagccacggtggcccatcgactggcggaattactgccggaaaacgggcagctttttgtcggtaatagcctgatcgtgcgtttagtagatgcgctaggccagcttcccgctggctatccggtttacagcaatcgcggcgccagcggcatcgacggcctgctttccaccgccgccggtgtgcagcgcgctaccgccaaaccgactctggctatcgtcggcgatctttctgcgctctacgatctgaacgccctggcgttactgcgccaatgctcggctccgacggtactgttagtggtgaacaataacggcggacagattttctccctgttgccaacgccggaagaagatcgccagcgcttctactgcatgccgcagaacgtcagttttgatcatgctgccgctatgtttggcctgcgatatgcctgtttgtccagttgggagaaactgcacgaagaggtgcagcaaagctggcaacagggcggtatgacgctgattgagctaaaggttccggctagtgaaggggcggaaacgttgcaatatctggcgcagcgggtggcggaactgtgacgctggcctgccgcaccgtcaattcgcacactggcacgaaaccctggctggtctggctgcacggtctgttgggcaatggcgaagattggtcagaggtagccgggcgctgtaccgaatttccctcgctgtttgtcgatcttccgggccacggcggttcggttgctcaagcgcccggtgattttgccgaggtcagccgtcagctaaatgcgacattggcggcgcaaaatattcaggattattggttgataggctactcgctgggtgggcgcattgccatgtatcacgcttgctgcggtgaacataccgggctgcgtggtttgttggtcgaagggggaaatcccggcctggaaaacgaagaactgcggcgagcgcgtctgctacgtgatacccattgggcgcagcgttttcgtcaggaacccatgacgcaggttctggctgactggtatttacagccgattttcgctgatttaaccgccagtcagcggcaagagttcatagatttgcgctcggtcaatcagggtttcacagtagctgctatgcttgaatccacctctttgggtcgccagccttatctgctgcctgcactgcaccagttggctataccttttgcctacctgtgcggtgagcgagaccttaaatttcagcaactggcgcgccagaaccggttgccgttacacacccttgccggagctggccataatgcccatcgggccaatcccgatgcttttgccgagcaggtgcgtttattcttatcactctcccgttaaaggaatgcttaatatgctgtatccgagcgaagaacaattgtacgccgccattgaatggcaggactgctcagccgggtttgaagatattcgttatcataaatcccgtgatggtatcgccaagatcaccattaaccgccctcaggtacgcaatgcgttccgtcctcagacggtcaaagagatgattcaggcgctggccgatgcccgttatgacgatcatatcggcgtgattattctgacaggcgaaggggataaagccttctgttccggtggcgatcagaaagtgcgcggtgactacggcggctatcaggataacagcggtgtgcatcatctgaatgtgctcgatttccagcgccagatccgcacctgtccaaaaccagttgtggccatggttgcaggctattccattggcggtggacatgtattgcatatgatgtgtgatttgaccatagccgcagacaacgccatttttggtcagactggcccgaaagtcggttctttcgacggcggctggggcgcggcctatatggcacgtatcgtagggcagaaaaaagcgcgtgaaatctggttcctgtgccgccagtacgatgctaaacaggcgttggacatggggctggttaacaccgtggtgcctttggccgatctggaaaaagaaaccgtacgttggtgtcgtgagatgctggaaaacagcccaatggcgctgcgctgcctcaaagcggcgctgaatgctgactgcgacggtcaggctggtctgcaagagctggcgggtaacgccaccatgctgttctacatgacagatgaaggtcaggaagggcgtaacgcgttcaacgaaaaacgccagccggacttcagcaaattcaagcgtaatccgtaatgcgtcgggcgagtttatatcgctttagtctgcctatggaggcgggcgtgattctgcgcaaccaacggctgaaaagtcgcgatgggctattggtggaattgagcgaaggtgaaaacagcggctggggggaaatctccccactgccggaattcagtcaggaaacgctggccgaagccgaagcggtgacacagcgatggttacaggcttggctgggcggagagcaaccggcggaaagtcctttgccttcagtggcttttggcctgagctgtgcgctggctgagctgaatcagacgttgccgatacaggcggattatcgtaaagccccgttgtgtaacggcgatcccgatgagctttttgacgtactgatggcgttgcccggtgacaaagtggcgaaggtcaaagttgggctatatgaagccgtgcgcgatgggatgatcgtcaacgtattgctggaagccttgccggatctcactttgcgtctggatgccaatcgaagctggacgcgtgccaaagccgacggatttgccaaatacgttaatcccggattgcgttcccgcattgcttttctggaagaaccgtgcaaaacccgcgacgaatcccgcgcttttgctcgtgaaaccggtattgccattgcttgggatgaaagcgtgcgcgaagccgattttcaggtgcaggccgagccgggcgttgcggcaatcgtgatcaaaccaacgctggttggcagtatcaaccgatgccgacaattggtgcaacaggctcatcaggcggggttggtagcggtaatcagttccagcattgaatccagtctggggttatcgcaattggctcggctcgccagttggctaacgccggatacggtgccggggttggatacgctggatctgatgcaggcgcagctattacgcccgtggccagacagtcaattgccgctgatttcgctggaacaactggatcgcatatggcgcggctaaaccagtggccatggcggcactgggcggagttgcaaccgcagaaagaggcgctgcggctggaaggtcggtctatcagttggcaacggctggtggcggatatcgacgccgtggcggccagttttcatcatcagggcgtggcggcaggccgtggcgttgcggtcagagggaaaaacagctatggcttgctgctggcctatctgggcgctttacagtgtgccgctcgcgtcctgccactcaatccgcagttacctgaaactttactgcatcagctgcttccggggctggatatcgattttattttcgattctcacgggagcgacttggctggcttagagctaacttctctgaccgacagcgcggcgtcgcctgtaacgccgcaaccttgggacgggcaacgtctagcgacgctaactctgacctcaggctcctctggtttgcccaaagcggcagcacatcaactcgatgctcatttggctagcgcggaaggggtattgagtctgatgtctttccatactgacgatagctggctgttgtcattgccgctgttccatgtttccgggcagggcattatttggcgctggcttagcgtgggtgccacgttagttattcggccaatgcagtcattatctgcagcgctggcgggatgtactcatgcgtcactggtgccgacccagctttggcgtttgttgactcaaccttcggaaaaactgagcctgacggacgtattgttaggtggcgctatgattccgactgaattgaccgagcaagccgaagcgcgtggtattcgctgctggtgcggttatggtttgacggaagcggcttccacggtgtgcgccaagcgagccaatggcaacgccggagtgggcgtggcgctttcagggcgacaggtgaggttggtggatcaggaagtgtgggtgaaaggagattgtctggccgcaggttattggcagcggggcaaattacttcctttgactgatgagaacggctggctgcacacccgcgatcgcggtcagtggtttgaggacgaactgcatattcttgggcggctggataatctgtttttcagcggtggggaagggattcagccggaagatgttgagcgcattttgctgcggcatcctcaggtttatcaggcatttattttgccggtgaacgatagcgagtttggccagcgtccggtcgcggtgatcgaaagcgatccccagctttcatggtcagaactggccgattggctagcaccgcaggtcgcgccatttcagcgcccagtggctttctatcgcttacccgatgaattgaagaatggcggaattaagatctcgcggcgttcggtgggggagtggttaaggtgatgtttttgtttgcgggtattttcgctaccggaaaccaagattgagtcgggtttcgaaagtgtaaccgttcggtttttccttaactcggttgggctgggaagtgatgtattcactaaactaatatcaaccgaaactggatgcggttttagatatgaattggctttgactttaaagcacgtatttgagctttctcacgtcaagattggagccggtttcgtaagcccagcagttcactgtctcctcacttgccgtggaggcttccgagcagggttggcgcgaaagtggggttctgcgaacgtccctcgggcgcgctttgtccggcgggtcagcgctagattcgcctgcgggcgttatcaggatgccatgccatcctggccctgcggctcaaggcgcgctttcaacagctgacggctgttcactcttggcctcatccctgctcggcccacttcctgattgcgcctgttgagtgcaaaaccagtgttcttacgaatcacaatttgcctttcgtttttgatagggcttttgaccttgagtttgatttttcagagcacatttgagcggctgagacgatgagtgagggaacctacttagtgggcaggcgatacgtgcggaggcgcggattgttaaggctcgcgcttacgagccttaactcggttgaggctgttgaggtgagatattcaccaagctaatatcaaccgaaaccagatgcggttttagatatgaacttctaccataacgctttttagccgcgcgatattagcttagccccagtgcctttttcacacctattccatagtctggatgtacttgctcaaacagcgctatctgacggcgttgaatctcttctggcacctgcgaaagttccccagcaatacgggtaaacatgcgctgatgttcttcttcgctcaacaggttaaataaggcccgtggctgactaaaatagtcatcgtcatcgcggtgattccagtgatccgccgcaccggtcagcgtcaacggtggctcgctaaaatcaggctgctcctggaataaaccgaagctgttcggctcataggtggcggtattgctgctgtttccgtccacgcgcattgcgccatcacgatgatagttgtggaacgggcatttggcgccgttaaccggaatctgatggtgattaacgcctaaacggtaacgatgcgcatcgccgtaggagaacaggcgaccttgcagcattttgtctggagagaagctaatgcccggaaccacgttggccgggttgaacgccgcttgctccacttcagagaaatagttctctgggttacggttcagttcgaaatatccgacgtcaatcagcggatagtcaccgtgtggccaaactttggttaaatcgaacggattgtacggaacttccgaggcttcgtgctccggcataatctgcacttgcagagtccaacgagggaaatcaccgcgctcaatggcttcgtacaaatcgcgctgagaactttcccgatcggaaccgatcagtttttccgcttcatcatccatcaggttttcaatgccctgctggcaacggaaatggaatttcacccaataacgctcgttctgattgttgataaagctaaaggtgtggctgccgaaaccgtgcatatgacggtaggattttggtaggccgcgatcgctgaaatcgatagttaactggtgaagtgattcaggaagctgagagaagaaatcccatttgtaggttgggttacgcaagttggttcgcggatcgcgtttgaccacatggttcaaatccgggaatttcaacgggtcgcgcagataaaacaccggcgtatcgttgcccactaagtcccagttaccttcttcggtataaaacttcatggcaaaaccgcgaatatcccgctctgcgtcagcagcgccgcgttcaccggctaccgttgaaaaacgcacgaacatatcggttttcttaccgatctgagagaaaatcttagcgcgagtatacttggttatatcgtgagtaacggtaaaggtaccgtaagcgccagagcctttggcgtgcatccggcgctcagggatcacttcccgatcaaagtgagctaatttctcaagaaaccagacatcttgcagtaacatcgggccgcgagggcctgcggtcaccacgttattgttgtcgacaacgggtgcgcctgctgccgtagttagtcctttctttttgctcatcatgttctccagtatcgctgttgaattgactgcgggtgttgaaatgagtctgagtgagagactctgttaaaaattggacttattgccagatgacaaagaatgactttagcgaatcgccgctgactgttctttgatccccccactagttgtagctgtataggtcaccttcggcaaatagatataggttatcgctgggattaaatctacggcggaacgattcatcgcatttagttacaatcatatgaaatgatgagttatttattcggttttttctggcttgttatgggaagcttttcggttaaactcatggcgggaaagctctgtcggcaagttgcgcggcagataattgaataataacgagagattatatgagaaagacacttattgcctgtgcagcaagtttgctgtttgtagcaggttcagccagcgcgatcagcgtcaccgcagaagcaggacgtcattacactaacctcggtgtcggtatgggcaccaacagcggcggcctggctgtgagcggtaactgggcgcgtagcgaccacgacggtgacatgggcagcttaggtctgggcttcaacctgccaattggcccattgatggcgaccattggcggtaaaggtatctatatggcacctgaagacggtaaaaacggcggcgcaattgccgttggcggcgggttgagctatccgataaccaaatcattcactttatacggtgaaggttatgtagcgccagaatccctgaccagtgggatgaaatcctacaccgaagcgaacgccggtgtgcgttggagcgtgattcgcccgttgacggtagatgttggttatcgttacatcaatatggaagggaaagaaggccgtcgggataaccgtctggcggatggcatgtatatcggtgccggtctaaacttctgatttcatgcgttgaaaacaaaacgggcgctgggtgtgatacccgcgcccatttttttatgtagagatactcggtttctatgtggagatactaggtataaaacctgttatttcagtgtattaacccactgcgggtaataccccggcgacaataccgacctgaatcgcaatcacggttacaccgcaggtaaataccagtgccagagctggtttaccgccccaaacacgatagtttttaccctgatgcatctggcgcgctttccaggccagtaacgaaggcaaaatcagcgccagcaccgatagggcaacggcggcaaagcccagcgccatgacaaatccgcgtgggtaaaacagggcgaacagcagcggtggtaggaaggttattacgccggtttgcagtcgaccgcgcaccgtattacgacgcttaaataaatctgccagataatcgaataaccctaaggctacgccgaggaatgaggtcgccagcgccaggtcggcaaacaggtgtaccgccagttcaacgtgtggtgaggcgacgacttcacgcacggcctgtaataaaccgttcagaccggcctgctgcgccagaataccgacaaaggtatgagaagaaatcgcgcccagcgtcgctaattgccagaaaatataagcgattaatggaatggcgctgccgatgataaacacccagcgcagtttgcgaatattaccgcccatataattgacgatacttggtacgctgccgtggaagccgaaagaggtgaaaatcaccggaatggcagacagcgccagcccttgctccaagggtaaggtcagcaggttggctttttccacgtgcggcatcattaatgccagcattaccacgaggaaaataattttcgcgctgaataaaattcggttaaataaatcgactgaatgggtgccaatgcacacaactccaccggctatcaacgtgaatagcagtacgccgagataggtcgggaagctctgctctgtccattggctgatactggttgccaaaagctcaccggcgccgctgatataggcagaggtcaaggcgtacatcaaaaacatcatgctaaagccggttaaccactgaccacggctgcctagatagcgtttggccaaagtgcccagaccggtatcagccgcttcgtgttgatatacttcaaccaataataatgcggtgtagcacatcaatagccaaagggagaccagaagggtcaaggttacgctgaaacccacgccagcggcagcaagcggcatcgccagcatccctgcaccaattgtggttcccgccacgataaaaatactgccaagagtgcgattcttcacgctttcctctgctaaccgacattttattgaaattattgagtgcagcagagtagatgatcccattaattctgtcaaatcgacgttacaactgatgtaaaattatgtttacactcggttgttgtttgatttatcaggttttattttaaagttgttgcgggcgcggtggaaagagtagaaaagattgtgtttcaccgaggctgttcttaaagtgtgagtaagggaatttgcggagagaaaaatgctgagaattgagatgttaagcaccggcgatgaagtattgcacgggcaaatcgtggacaccaacgccgcctggttggcggactatctgtttactcaaggattgccgatgagcagccgggaaacggtaggtgacgatttggaagcgctcatcgccgtactgctagaacgcagccatgtagccgatgttctgatcgtcaacggcgggttggggccgaccagcgacgatttaagcgcgatggcggcagcacgagcctgcggggtggaactgatcgaacatccacagtggattgcccgtatggaagcgtttttcgccgagcgcggaagagtgatgtccgccactaatcgcaaacaggcacacataccggccaacgctgaaatgctggataaccccgtgggaactgcctgcggttttgcgttccaactgaataaatgtcagatgtttttcactccgggcgtgccttctgaattcaaagtgatggtggagcagcagattgtgccgcgtttacgggaaagttttccgcagattgcgccaccgctttgtttacgtatgaccacttttggccgttcggaaagcgatttggcgatggagctagacccgctgccgctgccggaaggcgcggtgctaggttatcgttcttccgcccctattattgagctgaaactgaccggcccggcttcacagcgttcggcgatggaagaagtctggcagcaggtgcgtcaggtggccggtgaaagcctgatttatgaaggcacagagggattacccgcgttggttgccgggcagttgaatcagcgcggattaacgctggcgctcagtgagcaatttaccggcgggctgatcaatttacagctacaaagcgtgcaggcacctttagccggtggggaattgctgccgttatcctgtgtggaaactttgcctgagcttgccgcccgcgctcagtcgttggctgccctgtgcggtgcgccgttggtattggcggttagcgcaatgaaaggtgaaaatcttagcgtagccttacatacgccaaacggtactttcggacagacggttcgctctcaggccagccgtcacgggttaagaattcgacaggaaacgagcgcgatgctcggcctggaaatgctgcgtcgctggctggcaggaggcaaagtctgcggtcagcacggctggctgacggtgattgaaatgctgtgatatcacggcgcaaataaaaaagcagacagtgccatcactctgtctgctttttatctatttcgtcgatttttattgccgccgcggattatttttcctgcgcgctgtgtacttctttactggcttcccacagacgatatttcacttccacgccttgaggcacgtataccacgattggcaggcggctgttataacgctgcatggtattgttacccagattggcggtaacaaatgccggatgtttagcgctttctggacaggccatctgggttgataaaactccggagatttcattcattaccagatagtcgtaaccccagccatccagagtatgggattctaacttgccgcccaacatatggtggttacagtcaatttccagatttttgccaatcaacaattcaactttaaagcgatcttcatctggccgctgcggcagataaataacctggcggctcatacctgtttcagcggctgggaagggcgcgattttttccagcggctgctgttctggtgccgtattgtctgcggcgatagctccggcggaggcggcaagcagtaaaccggcgatcagggaaaatgttttattcatattgatttctccttgcgattaatgccgataattttaacacaaaagtatcataaggttagtatatgcaattggctataatcatattattcatagatgattatagccctgattttttgttaaaatgctgaatataattttacaatgctcgttttataaaatgaaaaactaaattttgtcttattatacctcctcatagtacaaggtatgtatgtgcccaatgattccaagggtacgtgattccatatttctattcattattgttaatgaatgaatattttttatatattgatttactgtaattgtaataaggagaggctatgaatgttggtatgacatcaggcgtttatcagattaataattcaatggaaaacgtcgctgaaattaaacgtggttctcagttcactcattcgttggctaaacttttaactaaagtaaaaaatgtctacatttcacttgttacctcggtgaggtcatcagcagtatcgaaaggggaagataaaacttcccctgaagtgaaatcagaaggacggttacaaaaattgctaaccggaattaaacaattatttggctctttatccacatcctttaatatcgacaaatcaaaatcatcagcagcgagttttacgttacacagtctatttgatattaaggaggtagagcgcggcgatgggattgaaaaactttgtaaaaaaataaaagagactgcaaagcatgaagatattcttactatgtttaggacgtcaccgtcgagcgatgatgcacaagaaataaaacaaaaaaggtttggcttcgaacaattttgttcaagtcagaattgtactcctgaggttttgtcctcaattttcaaaaaagagatgagtcatcttttgcctaaattagataataatgattttaagcgtcttcctgatattcatcccgaaaataaacaaacgcttgatgattgcaaaaacgcggtacggaatgtcttgatagagaaaattaatcagatgcctgcggataaaataaaacttgtggttatgatgctcaatacgctagcagaagttaaaaaagtggcaatagataaagaggaccatactctaagagacatcaatggacttaaccgctatgtgattccccatttgattggtgatgatcttgaatctcgctatttagaaaaaatacccggtaccaataagatgatgaaagatgatattgaagctaagttaactacgccatttaatcactggcaacatctatctatagcgcaatctggttacgtacaggtatttaactgagataaaagttgggtggtgatatgtttaataaaaaaccgcgctaggggcgcggtcatcagtagtttactttgttttatctgtctgcctgaaaaagtgcgttgcagactaaatttccagctcaatatcacccaccggttggcagcagcaggggagaatttccccgtcttgtacaaaggccagcggttgctgggcgtagcaaacttcgccttttagcaaacggatacgacaagaaccgcaatagcccgagcggcattggtattcgacctgaatctgatgctgctccagcacttccaacaggttggattcattatcgggatagggcaactgcgtacctgaagtacgcagattgataatagatttttccatgcaattaaagctggaaatcactcaaatcgtcggcgctgacttcggaatcaatctgaccgaccagataggagctaacttccacttcctgcggggcaacctgcacgttgtctgacactaaccaggagttaatccatggaatcgggttggtgcgggttttaaacggaatgcctaaacctacggcctgcatacggatattggtgatgtattccacgtattggcacagaatatctttattcaggccgatcatcgaaccgtcgcggaacaggtattctgcccattctttttcttgctgcgcggctagtacgaataggtcgtaacactgttgctgacattcttcggcaatttcagccatttccggatcgtctgcaccggagcgcatcaggttaagaatatgttgagtgccggtcagatgcagagcttcgtcgcgggcaatcattttgatgatcttggcattgccttccatcagttcgcgctcggcgaaggcgaaagaacaggcgaagctaacgtagaagcgaatcgcttccagcgcattgacgctcatcaggcacagatacagctgctttttcagctcgcgcaggttaacgaccacggttttaccgttgacctgatgggtgccttcccccagtaaatggtaatagctggtcatttcaatcagatcatcgtaataagccgaaatatctttagcgcgtttcagaatttcttcatttgtcacgatatcgtcaaataccaccgccggatcgttcacgatattgcgaataatatgggtgtaagaacgagagtgaatcgtttccgagaacgaccaggtttctacccaggtttccagttcaggaatggaaatcagcggcaataaagccacgttcgggctacgaccttgaatggaatccagcagcgtttgatatttcagattgctgataaaaatgtgtttttcgtgttccggcaacgcgttgtaatcgatgcgatcgcgggaaacgtcaatttcttcagggcgccagaagaaagaaagttgcttttcaatcagcttctcgaaaattgggtgtttctgttggtcgaaacgtgccacgttaacggactgaccaagaaacatgggttcgagtaactggttgtttttgttctgagaaaaagtggtataggccatgatgtcctcgaggatatcgcaaaaggcaaaaagaaatggccctcaggatgactcgatttttgcgcggccgaaacggcagggcgcaaaatgatcaaccgccagccaatcgctgaatggattgtccggcgggagggccttaactaaaaatcaaatcttacacgcaccgccttcgcagtcgtcgtctccgggctgaccctgaatgtcttcctgcacatcgtcagccccgtcgcgggtgttttgataatacagtgtcttcacaccaaatttataggtggtcagcaggtcttttagcaattgcttcatcggcactttgcctgatgggaaacgggccggatcgtaattggtattagctgaaatggcctgatcgacgaatttctgcattaaaccgaccaattgcaggtagccatcgttatttggcatttcccacagcagttcgtaagcctctttcaggcgttcatactcaggaacaacctgacgcaaaataccgtctttcgaggctttgatactgacatagccgcgcggtggctcaataccgttggtggcattggagatctgcgaagaagtttctgatggcatcagggcagacagcgtggagttacgcaggccgaattcctgaatatctttacgcagcgtttcccaatcgtagtgcagtggctcatcgctgatcgcgtccaaatctttcttataggtatcgatcggcagaataccttgagaataagtggtttcgttaaaccactggcatgcgccttgctcacgcgctaactgattagacgctttcagcaggtaatactgaatggcttcaaaggtacggtgagtcaggttatttgcgctgccatcggagtaacgcacgccgtttttcgccagatagtaagcgtagttaatcacgccgacgcccagagtacgacgacccatagcgccacggcgagccgcttcgatcgggtaatcctgatagtccaacaaggcatccagcgcgcgaacggccagaatagccaggtcttctaattcatccaggctatcaattgcgccgaggttgaaggcagacagcgtacaaagcgcaatttcaccgttcggatcgttgatgtcgttcagcggtttggtcggcagcgcgatttccaggcacaggttggactggcgtaccggcgcaatcttcggatcaaacgggctgtgggtgttgcaatggtcaacgttctgaatgtagatgcggccagttgatgcacgttcctgcatcatcagggagaacagttccaccgctttgacgcgttgctgacggatgctgctgtcctgctcgtactgggtatacagacgttcgaatgcttcctgatcggcgaagaaggcgtcatacagccccggtacgtcggacgggctgaataaagtgatgtcgccgccttgcagcagacgttgatacatcagcttgttgatttgtacgccgtaatccatgtggcgaacgcggtttccttccaccccacggttatttttcaacaccagcaggctttcaacttccagatgccacatcgggtagaacagggtggctgcgccgccgcgaacgccgccctgcgagcaggatttcaccgcggtctggaaatgcttgtagaacggaatacagccggtgtggaaagcttcgccgccgcgaattgggctacccagcgcacggatacgaccggcgttgataccgataccggcgcgttgagaaacgtatttcacaatggcgctagaagtggcgttgatagaatccaggctgtcgccgcactcgatcagtacgcaagagctgaactgacgggtaggagtacgtacgccggacataatcggcgtcggcagtgaaatcttgaaggtggacactgcatcatagaaacgcttgatgtaatccatgcgggtatcacgcgggtagccggagaacaggcaggccgcaaccaggatatacaggaattgggcgctttcgtagatttcaccggtaacgcggttctgtaccagatatttcccttccaactgcttaaccgcagcgtaggagaagttcatatcgcgccagtggtcaataaaaccgtccatctgctcgaagtcttcagcggtgtagtcttccagcagatgcttatcgtatttgcccatgtcgaccattttgctgacgtggtcaaacagttttggcggctcaaactggccgtaggcttttttacgcagatggaaaatcgctagacgcgcggccagatattggtaatccggtgcgtcacgggagatcaaatccgctgcggctttgataatagtttcatggatatcggcggttttgatgccatcataaaactggatgtgagaacgtaattctacttgagatactgagacgttatgtaaaccttccgcggcccagtcgatgactcggtggattttatcaaggttgatgcgctctttgctgccatcgcgtttagtaacaagtagactttggttcatgtgttcttgaccttttttcccctgttcagcctacataaaacacaagtctatgctctccttgattgcagtaatcattgagggcagtagtgcattgttcagtatgtaaacactatatgtgggggtagtatgttggtgagataacaagatagtgagaaacgacgattttagcaagtgaacaaaaccgacgaattgtgtggataacttgggggtgaaatgttaccaacggcttacaacctgcgtcagcactggagatcttgctccctcagtctgggggataagattttaccgaaaatcttaaaaatttgattgtttgacgctttattaaacgttagaaaaaaacgcgataaggtctctgttttaatgtcaaaaaaagcggcttggatcgcatttttctgttgacggcgcataaatcaacgtatttcggatagaagctgatcaatctgataaaaattcgggcgacgcgcagttggccgccatcgcccttaaagctatgaactattcaacgctacccattaagactctcttgatccctttgggtgtgcagcatgtagttgacgtctacgttgcgaccgagcttaaagtgatcggtcagaggattataatgcaggccaataatttgcttttctcgtagcggagtttggtcgatccaaccgatcaattctgacggacgaatgaattttttcgagtcgtgagtgcctttcggtaccattttcaaaatgtattcagcgccaactaccgccatcagccaggatttggtattgcggttaatggtagagaagaatacgtggccgccgggtttaaccaaacgggcgcaggcgcgaatcaccgaagccggatctggaacgtgctcaagcatctccatgcaggtcactacatcgtactgctgcggatgcgcttcagcgtgagactcgacggtttcttgtacgtaatcgagcttgacgccggtttccaaggcgtgcaaacgagccacttgcagcggctcggtgcccatatccagcccggtgactactgcgccttcccgcgccatactttccgccaaaatgccgccgccgcagccgacatccagaactttcttaccgaaaataccgtctgcgcgttgcaaaatatagttcagtcgcaacggatttatccgatgaaggggtttgaattcaccttctaaatcccaccaacgggaggcgacggcctcgaacttggcgatctcgctttcatcaacgttagggcggtttgctggggtttctgcacgcatggctgaatatcactcctctatctctttgcgcggattatacatgctccccgcagattggcgcagttttgtatcgtcagcctaagtttcatcggaagcttgtggaacaggaattcgaggataaacttggcatattcacgtctgtagtttccccaaaatctgcggtttgtgatatagtttcgtacctttgaatccggtaattagtagagggatagcggctcaatgagcgaccttgccagagaaataacaccggtcaacatcgaagaagagttgaaaaactcctatttggattatgcgatgtccgtgattgtgggacgtgcgctaccagatgttcgagatggattgaagccggtacaccgtcgcgttctgtttgcgatgaatgtactgggtaacgactggaataaaccatacaaaaaatcggcccgtgtagttggggacgttatcggtaaatatcacccgcatggtgacagcgcggtctacgacacaattgtgcgtatggctcagccgttctcactgcgctatatgctggtggatgggcagggcaacttcggttccgttgacggcgactccgccgcggcgatgcgttataccgaagtgcgcatgtcaaaaattgctcacgaactgctgtcggatctggaaaaagataccgtcgattacgtgcctaactacgatggcaccgagcagattcctgccgtcatgccaactcgcataccgaacctgctggtcaacggcgcgtcgggtattgccgtcggtatggcaaccaacattccgccgcataacctttctgaggttatcgatggctgtctggcgtatatcgaagatgaaaacatcaccattgaagggttgatggaacacatcccagggccagatttcccaacgggcgccattatcaatggtcgccgtggtattgaagaagcttatcgtactggccgtggcaaagtgtatgtccgcgcccgtgctgaagtggaagctgatgctaaaaccggtcgcgaaaccatcattgttcacgagattccgtatcaggtgaacaaagcgcggctgattgaaaaaatcgccgagctggtgaaagagaaacgcgtcgaaggcattagtgcgctgcgcgacgagtctgataaagacggtatgcgcatcgttatcgaagtgaaacgcgacgcggttggggaagtggttcttaacaacctgtattctctgactcaattgcaggtcactttcggtatgaacatggttgccttgtctcagggccagccaaaattactgaatctgaaagatattctggtggcattcgtgcgtcaccgccgcgaagtggttacacgccggactatctttgaactgcgtaaagcccgcgaccgtgctcatatcctggaagcgctggcgattgcactggctaacatcgatccgattatcgaactgattcgccgtgcggcaacgcctgccgaagcaaaagccggtttaattgccaatccgtgggaactgggtaacgttgcttccatgctggaacgtgctggcgatgatgctgcgcgcccggaatggttggaaccagagtttggtatccgcgacggcaaatattacctcaccgagcaacaggctcaggcgattctggatctgcgtttgcagaaactgaccggtctggagcatgagaaactgctggatgagtataaagaactgctgactttgatcgctgagctgatctttattctggaaaacccagagcgcttgatggaagtgattcgcgaagaattagtggcgatcaaagaacagtacagtgacgcacgtcgcactgaaattaccgctaatacttccgatatcaacatcgaagacctgatcagtcaggaagacgtggttgtgacgctatcccatcagggttacgtcaaataccagccgctttctgattacgaagcgcagcgtcgcggcggtaaaggtaaatcagcagcccgtatcaaagaagaagacttcatcgatcgcctgctggttgccaatacccacgacactattctgtgcttctccagccgtggtcgtctgtactggatgaaggtgtaccaattgccagaagccagccgcggtgctcgtggtcgcccaatcgttaacctgctgccgttagagccgaatgagcgtattaccgctattctgccggtgcgggaatacgaagaagggcgtcacgtctttatggcaaccgccagcggtaccgtgaagaaaactgcgctgaccgaattcagccgccctcgcagcgccggcattattgccgtcaatctgaacgaaggcgatgagctgatcggcgtcgatctgaccgatggtagcaacgaagtcatgttgttctccaccgaaggtaaagtggttcgtttcccagaagaacaggttcgttcgatgggtcgaaccgcgaccggcgtgcgcgggattaacctgaatggcgatgaccgcgtcgtgtcactgattatccctcggggtgacggtgagattctgacggtgacagagaacggctacggtaaacgtactgcggtagaagaatatcctaccaagtctcgtgcaacgcagggcgttatctccatcaaagtcagtgagcgtaatggtaaagtggtcggtgcggttcaggttgcgccaactgaccaaatcatgatgatcaccgatgccggtactttggtgcgtactcgcgtttcagaagtcagcattgtgggccgtaatacccagggtgtgacgctgattcgtactgctgaagacgagcacgttgtcggcctgcaacgagttgcagagccagaagacgacgatgaggatgaagcacttgaaggtgaagaaggcagcgcagagaactctgagctgccagcagcaccggaagatgatgccaccgacgcgccggaagacgacaacgcataatgttaaaacaggtgcggaaaatcgcgcctgttattgactgctgtgatgaaaagacaagccagcctcagtgctggcttttttatgtgttatcggtagtgtattctgttagcagaactgcccatccggcaacgttttcaccatggtatccgattgaaatatctttcttcttttcgaacaacgctaaaaatatcccgctatttattccgggtacttgccgttatgctgtggtcgctaggcgcactgctgaccaccttctatatcctgaatattctgaatgagaaaaaatcggatattcgtcaggaatataataccaatttcgaacaggcgcagaattacatccggcattctgctgatattatccgtgatatcagatatatggcggaaaatcgcctcagcgagctcagtaattccgtcgagatacgcagcaatggcatggcgcataaagccggtgagccaaaatattatccgcttaatgtcaacgctgaatgtggcgatctgcgttcttcgtaccattcttcgctggaatcgctgagcgatctgattctgtactggaaagagaactttgccgctgcgtacgaccttaaccggatctttttcgttggcgctgaaagccgctgtctggttgatttcaatatacgtaatacgccgttggatcagaaaaacctgctttccgctctgcatgaacatatgcagaaatatatggatgcgaaaaatcaggataaagacaacactctgtattttgtggtgcccggcgcgcgctcagataccggttatctttatgtgctaacgccggtgtttattggcaataagctggaagcgttgattggtactgagcagacgattcgtctggaggactttatctcagcgggaaccttgccgattggcgttactttgctcgatcagaataatgagccggtgcttcgtctggctaccggcgaacgctatgcctctatgctggatgaatatccggactcaccctcctattttggctatgcagatgattataacgacctgatcctaaagaagaatttactgccttcatcgcttagcattgcttattcattgccggtgaaaaccgtggttgaacgttttaagatgttgatttttaacgcgctgctactcaatgctttgtctgcggttgtgatttttactttagcctgggtatttgaacgcaaaatgttccgcccggcagaaaataacgcttcgcagctggaagaacacgagcaatttaaccggaaaatcgtagcttccgcgccggtggggatcagcattttgcggctcagcgatgggactaatatcctgagtaatgagttggctcataactatattaatttgctgaccaacgaagaccgggaacgcattacgcgaattatctgcgatcagcaggctaattttgtcgatgtgatgaccagtaataacaataatttgcaaatcagcttcgtccattcccgctatcgtaatgaagacgtggcgatctgtgtactggtggacgtcagttcgcgggtcaaaatggaagagtcgttacaggaaatggccgccgccgccgagcaggctagccagtccaagtccatgtttttggctacggttagccacgaattgcgcacgccgctgtatggcattatcggcaacttggatttactacaaaccaaggagctgccgccgggcgtggaccgcttggtcacggcgatgaataactcttccggtttactgctgaaaatcatcagcgatattttggatttctccaaaatcgagtcagaacagctaaaaatcgagcctcagcccttctcctgcgtggaagtgattactcatattactgcgaactatttgccgctggtggtgaaaaaacggcttggcctgtactgctttattgagcctaacgttccggtcatgatgaacggcgatccggtgcgtttacagcaggtcatatccaacttattgaataacgccattaaattcaccgataccggctgcattattgtgcaggtcaggctgcacggtctgtatttggaattccgcgtacaggataccggcgttggtattaatgcgaaagaaatcaatcagttatttgaccccttctttcaggtcggtactggcgtacagcgccacttccagggaacggggttggggctggcgatctgcgaaaagctgatcaatatgatggatggcgatgttgaggtgaattccgaaccgggtatcggcagcgtattttcaatccgaattccgctatataacgcgacgttaccgacgcctccgactggcaaatgctggaaggggaagactttgctgatggaagtgcggaacgcccgcctcgaatcttatctgaccagcctgttttgcagttacggcgcagatattcagcgttacaacggtcaggcaacccgtggggatgaggtgctgattaccgattacattccgcaagtcgccacgccgctgttggcgcgaattcatttttctatcgaacatataggtttaccgcaggaaacccggccaggctactgggtggtcagcacttcaacgctgctggaagccgttcctctgttgcatcgaattttgctggatgtatcgattatgacgtccacgccgctgcaattaccggtgccggataaagataatcaggtagataatagcgatatgcgtattctggtggtagatgaccatccgataaaccgtcgtttattagctgaccagctaacgtccttaggttatcaggtgcttacggctaatgacggcattgatgcattgacggtattgggtagcaatcctattgatatcgtgttgacagatgtcaatatgccaaatatggatggttatcgcctgacccaatgtttgcgcgaacaggagctgcatttcccagtgattggtgtaacggctaatgcgctggcggaagagaagcaacgctgtctggatgcgggaatggatgactgtctgtctaagccggtgacgctggatacgctgcgacaaatgcttaatcactacagtgaaaaggtgcggcaggggcggtgagtggatttgaaataataaacccgacgcgagaaagccgggtttattggtaggaaaaccgctttattaccctttatattactctttatcaacctggctgatgctgacggaagacaggtaatttagcagggcaatatcgttatccacacccagtttcagcatggctgattttttctggctactgatggttttgatgctgcggttcagtttccgggcgatctctgtcaccaggaagccttcggcaaacaggcgcaacacttcgctttcttttggagaaagacgtttgtcgccgtagccgttagcgctgattttttccaacagtttagccacgctttccggggtgaattttttccctttctgcaatgcggccaaggctttgggtaaatcggtcggcgcaccttgtttgagcacaatcccatcgatatccagatccaaaacggtgctgagaatcgccgggttattattcatggtcaaaacaataatggccagatgcggaaaatgacgcttgatatatttgatcaacgtaatcccgtcaccgtacttgtctccaggcatggagaggtcggtaatcagaacgttggcatcaagttttgacaagctgtttatcagtgcagtggagtcttcaaactcaccgactacatttacccattcaatttgttctagtgatttccgaatgccaaacaaaacgattggatggtcatctgcaataattacattaaggttgttcatgttatgggttaccttgctgcaacagcctactgacgaacgaatcaatctggctgatgctagtttcgatcttcaactgatcgccgtttgcgatatgctgttctaatgtttcacacagttgcttgccgagaaccagattcaacatagcaaacacgcctttcaatcggtgcgcggtctgcgagagcgatataaaatcacgttgctgggcctcagtatacagtttcttcaaatctaccggtactgtctcaacaaacagcgcataatagtcactagattttaactgttgctcatatccggaaatatcatcctcgacagggttttcttccgctgtttccacgctatgagcggactcataggaagaaatctgctgctctatcagtaacagaatggcgtctatcaccgcgctgccaaggttgtagttaacccgaatatagttctgttgcaactgttgtaaacccggctcgtctgaagtcagtaagagggtataaggcgcatagttttgcgggttatccgttaacattacgtcatactccctgcccggcagacgatcgtctgcaataatacaatttgcaccgaacgcattcagtagcgtagtcacgatggatttcacttcatctgaagtaatatccagcatcacggttacgccatctagtaatttctcctcttcatcttcttgattttcgtgcaatcccatagcaacgcggacggtgtaacgggtaccgatgtccactttactgcggatttccagctgcccgttcatttttttgcataactgattgcacaaaaagaacgtcagaccagagccctgactatagcgatcaaccagcgtttggcttaggaacggatagctgagattactgatttcttcgtctgaaataccggcaccggtatccacaatctgaatagtcagtaactctggatgctcaggttcatgtttcaccgttaaggtaattttaccgtagctggtggtcacaatggcatagttcagcaacaacgctagcactttacgcaatgcacgttcatcaccgatataggttttgtctacatctgccaaataatggttgaataaactcaatccttttcggtttatggacggcaaagcttgcagcaatagctcatcgatcagtctggatagcgagaaattctgctgttccggttgccaatcctgcgtttccagacgggtgagcagagtgatgttatcgatgagcgttagcacgctatctgaatgctgaaccaactcgttgactagagactcacgtaactctggatcggtgtccggatgctgtagcaaccggtgcgctagctgatttaacatgctaaccggttgattcagctcgatgcccagattatgcaacatcagcttccgcgcctgtagattcttatcgtattcgcgccgcgccatttgcagttttttgttcaccagtacttctttatcctgatcgtgcagcaggaaaaggtaagtttttggggataatcgactgcggaacattcgtatttcatatacttcgttgttaaccgttccctgaatgaccccgtgatgctgttctgccatatgggcaattttttgcaaattaagatgaggcagcaagtgctcggcaattttgttgctggccaccagcttactggtcgcaaagttatataccagtaatcctaaaggcaggctggcaataatttcctgattcagagacttctgtgcttccaattgctcggccatatcttcaccggggcgaacatactgatggcgaatcaaatagatgcacagcagcgtcaggccgaataagaacagattagttaagatcagccaggaattattgcgcgccagatcgagggccagaccggtcaagggaacgcgatacactactttgagcgaggcattggccagcggagcggcaaactccagccatgaaccgttaatggctaccgaggcggtagccaaatcttccggagccatcccgccatcgccaattggcgtgttgtccggctggagcaggaagctggagcgcgccatattgactggaatcagatcgttaatcggcaaatcaaaggcgataaccgtcgccagatggccgggatggttgaaggtggttctgagcgtaaaataataggcattttgaaaacgctgtttacgtaacggagaaaaactttcccgctcatccagcgtattggcctgttgcagcatttccgcccggcgagactcagcggacgctgtcaggtaggtttccttaaagcgggtggtgagctcttttagcgactgagtcgtaatcagaatcaggctgttatcctgcccgttcaggtagtacatggaaaaggtgtcgctctgtgaaccccagcggctatccagatagtttgacatacgcaaagtcatgcccagcgtggctctatcatgattaccgaaaatcaccgcatcagttttagctctgggtttttcaatgaaataaacatcaggccgcaggcgggtttcttctacacccgcgggtagcacctcatcggcatcattgtaggcgggattggtcgccaactcgtaaatctgataggtattgtagcgataatcatcaatacgctgctgcaagctggtagcgatattattcagagcaaactttttttctgccagatatgcgttggtatagttgtagccgtagagacccacggcgatcagcaatagcaggataaacagccaaaaacagcgggcgatattggtcaggctaagaggtaacgaattattttgcatagggataacgctgattccttgattaacgcgttactgtccgggcgctggccgttacgctgagtaacagaaccgctacgcacccgaaggcaaagggcaaactactgagctgtgcgataaaacctatcagcgcaggacctgccagaataccggcgtagccaatggttgtcattgaggcaatggctaaattcgttggcataacccgctgattgcccgcagcggtaaacagaatcggtaccacgttcgaagcccccaacccgaccagcataaaaccagccatagttgccgtaggattatcaaagctgatagcaataataaaaccggcggcggcaaataggctaccgcccaataatacggcatagcggcctagtttattcacgatacgatcgccgttcaaacgccccatcgtcatagcgatggcaaaaatagcgtagcccatgccggcctgagaaggttcgataccgcgtaagctagtgagaaacaatgcgctccagtccaacattgaaccttcagccaaaaacatcacgaaacacaggaaaccgagaaacatcacccagcctttagggcgtacaaacagcgggccatcgtgtggttctccgctgcctgccagcaggtttctgttcgccatcgccagcaaggcaataatgactattacggtaatcaacaccgcgactaaaggagagagacctagccacagtagcgcactgactccgccagcaccggcgataccgccaacgctgaacaggccgtggaatcctgacatcatggcgcgaccgctggccttttcgacaatcaccgcctgaatattcattgctacatcaattaccccgatagcagccccaaatagcagcaatgccacggccatgctgatgggagtatccatcagtaccagcagcggtaaatccagacacaaaagggcaccggcaatcaaaataacccggcgacagccccatttcgccgtcattacgccggtcaacggcatagccagcagggatccaacgccaatacacagtagcagtaaccctaatgacgcatcattaagagcaattctggctttggcgaaggggactagcggcgcccaggcggccattgccaaaccggcaataaaaaaggccaggcgggtagcgatctgttgaggaacgccgggcagttcgtgttgttgctctatttgggtgctcatgttgattttggcttgtcgtgagggtgaataactaaaattgagacttgtttctatcacaaagcgaaatccgggtcgaagatattcacggcttcggacggattaatcgtgggttagcgtgctgggttgataaggtctgggtcgtttcattgggggtaattcagcctgttattattttctctggattttttaatgattaaaaaaatttaataatatggtttggcggtgattcttccagtgattatctatttttatcatataaaaaaattcatacacatcgtcagggacaaaaaaaccataaaacaacgataggtcaattggcgaactgcttgattaaatgtaaagccattgcaattagttagttaactttttgtcaccccgaatgaccctttaaggttcgccccgtcattgattcccctactttttatcatgattagtattcactcaaataatgaaaatatttttgtacaagcgttgaaatatctacttatatctaagtattagcttttgaagtaactacgcaaaattttaacaaaataaatgtatttatcgtgccttggttcatttttacgttgtcatcaacaccgaaaacaagcttaaacccagattaacaaggtttactttactctcctgcgtctgactacccgccctggggtggttttacgtggaggtcgcgtcctgcttgctttgtgaggttacctatggcgaacaccgctgccggctcagttgatatcatttcccgcctaaatggcaaacaaatcacccatgttgccagtggcaatcaaattgtggtgcttaatgaacccagcgtggtgcgtatccatgcggctacggatagcgttgttcgctatgagcgtcaaggtaacgatctgattttacatatgaaagatggtagcaccgtacgctatcaacactttttcaaggcagatgcagaaggccactacagtgagctggtgtttgatgacggcttgcatcaaccggtctatgccgtcttccctccgacgctgttggccgcagggggcgaaaccgttgctctggtgccggaatttgccgccatcgatgggctatccagcctggtcttaagcgacggtattgcctccaatgctgtgctggctggcgttttaggctttctggccatcggtgccgggattggtatcgcagcgggtagcagcagcggtggtggcagcggcggcggtaatcccaatacgccgactttgacggtaaatccgttgaccggtgacaaccgtttgaacgcgaacgaaacccatgcatcacaggtattgagcggcgagacaacctttattgctgcgggtcagacagttacattgattttgaacggcgtaacctataccaccaccgtcggtgccgatggtaaatggagtttcaatctgcccgcttcggtactagagggtctgcaagacggccgctatagcgtgattgtcaaagtgaccacgccaggcggacagacgctggaaaaagatttcacgctggaagtggataccgttgcgccagcgctcacggtttcacctttggctggcgacggtattctggaaggcgcggaactgactcagccgctggtggtgaatggtaccgcgtcggctggagatgcaggacaaaccgtaaccgttggctttaacggacagacatataccaccacggtaggatctgatggcagctggagcgtgacaattccgccttcggccttgaccggtatcagcgtgggttctcatccggtcacggtgaccgtttccgatgcggcgggcaatactaccacggtaactcaacccttgaccgtcgcgggcaatgcttcgctgactatcggcgattttgcggtgaataatattctggatggagcggaacagcagcttaatcaaaccattagtggcagtaccaaaggcattaccaccgggcaaactgtaactgtaactttgaatggtaaaacctacaccgcaaccgtggatacgaatggtaattggaacctgtccgtacccgccgccgatctggcgttgctgatgaatggcactagcaccattcatgcctcggttaacgatccggaagggcgtcaggtcaccggcagccatgatttcatggtgaataacaacttcagcgccatagctatcagcccggtgtccggcgatggcctgattaatgcgaccgaagcgcaaagcgatatgaccgtcagcggcagtaccagcaatgttgctgccggtactcaattgacgctgactttaaatggcaaaacctatactgcgaccgttggcctcaacggcagttggagcgcgcagattccggcggcggatctggcattgctggccgatggcaacatcacattgactgtaagcggcactgatgccgccggtaatccggtcagcggatcgcagcaactgggcatttatatccacgatctgccgtcagctagcctaaccttgccttttggtgatggttcattgaacggcgttgacgtgcaggggaatcagacattaagcggttcgaccggagtcagcggtgcggggcaaaccgtgagcgtcaccattggtggcatgacttatccggcagtggtagcagcggacggcagctggtctgtcagcattccgacttctaccttacaaggtttggggcaaggcccgcagccgatctcggtgacggtgagcgatatcgcaggtaacaccaatacccaagtcacgccggtattggtggatactttcgcgccgaccataaccctttcccctattgctggcgacggaacaattaacgcagccgaagccgcgttaccggttgccattagcggtacttcttctgaagcgggctcgactattacggtgagtttcaacggcggcagctatatcggcgtggtgcaaaacgacggtacctggagcgtgaatattcctgccagcgcctttgtcggtctgccggatggcccggcattggttagcgtgacggtcactgacgtcgcaggcaatacgacgacggtcaataaaaccgtcattatggatgccgctccggctaatttgccaacgttggatatccataactttgctggcgacaacgtactggatggcgccgagcaaaaagtgaatcaaaccatcagcgggagtacgactcatatcgaagcgggtcaggttgtgaccattactttgaatgggaaaacctacaccgcgacggtggatggagtggggaactggagtactcaggtgcctgctgccgatttggcgttgctagccaatggaacaaccaccatcaatgctcaggttggcgatgtcagcggtaacctggcgtttaagagcgaaattattgacgttgatagcaccaagggggggctggctatcaacaccatcgctggtgataacttactgaatattcaggaagcgtccgcctctatcaatattaccggtacttctgccaacgtagccgtggggacgctgttacaggtgacgatcggcggggtgccttattttactacggttcaggccggcggcgtttggagcgtaaccatcccatcggttagcctgttcgtgttgcctgatggtagtactccggtcaccgtttccggggtcgatctaggggggaacccggtttccagtactctggacttaggcgtattcatacataatccacccaatatttcggtcgatccgctgtttatcgatgacaggctgaacgctgcagaagtagcggtcaatcagacgattaccggttctaccgggattaccggccctggccaaaccgtggctgtgacttttggcggtgtcacttatcagggtaatgtggctgtggatggtagctggagcataacgctgcccagtgcggcgttacaggctctggggcaaggtctgttgcctttcagtatcatcgttaaggatattgcgggtaacgaaggattctttgcgaccagtattctggtggataccgttgcgccaacgttagccgtgaacccggttgccgatgatggcattatcaatctggcggaagccactgcaacggtagtgatcagcggaaccagttcggaaattggggcgcagatcagcgcgacgctcaacggaaaaacctattttgcaacagtattgtctaacggtacctggcagttcagcgtgccgccggcagatctggtggggctggcagagggcaactattcgctatctgttatggtaaaagacggcgttggcaacacgacaacggtttcacagaatctgacgatcgatgccgatccggccaatttaccaacgctgaccatcaatccctttgcgggtaacaatattctggacggtgccgagcaacaggtcacgcaaagcatcagcggtgtcaccactggtattgaagcgggtaagagcgtgaccgtgactttaaacggtaaaagctataccgcaatcgtagccggtgacggcagttggagcacgcaggttccctccgcagatttggtgttactggcgaatggcagcgccactattactgctagcgtcagcgatgcagccggtaatccggcggtaggctcggaaactattacggtaaataaccagttagccgggctgagtatcaatccggtcgctggcgataacctgattaatgtggctgaggccgccagtaatattaccgtgagtggcgcctcgaccaatgtcaatgtcgggcaaattgtcactctgacgctcaatggcaaaacctataccgcgacgattggagcgggcggcgtatggagtgcgcaaataccagcggctgatttggctctgctggctgatggaacaatgaccctgactgccagcgctaccgatgcagggggtaacccggtttctggttcagtagatttgggtatttatatccacaacctgccggtcgttagcgtcggtcctctgtttggcgatggtgtggtgaatattgccgaagcggcggtaaatcaaaccattaccggtagcactggcattaacggcgcggggcagaaagtatccatcaccgttggcggcggaacctataccggaatcgtggcggcggatggtagctggagcgtcacgctgccaagtgcggcgctgcaaggattgaatcaaggcagtcaaccgctgatagtgacggtttccgatgccgccggtaataccaacagcctgagcacgccgattacggtagatacccaagctccgttactgactctggcaccgatcgctggcgacaacattattaacaaccctgaagttcaaggcgtaattacgctaaacgggactagctcagagctgggcgctaccgtttttgtcacgatcaatggacaaacctataccgcggtagttcagccgggtggtaactggagtttgtcattgccagcgggcgcgctgtctggcctgagcgatggtaactatgcgttcacggtgaaagtgacggacgcggcgggcaatccgaccacggtaacgcaaaatgtcgccgttgatgccgatccggctcatttaccaactctgagtattcatgtttttgcggggaataatattgttgatggtgctgagcagcaggccgcgcaaatcatcagcggtgtcagtaccggattagaagctggacgtatcgttaccattaccttgaatggcaaaacctataccgccgcggtcggcagtgacggcaactggaatacgcagattccggcggcagatttggctctgctaagtaacagcccgttcaccatgaccgccagcgccacggatattagcggcaacccagctaacggtagccaaagtattacggtagataacaccgctagcggtttgtccattagccagctaaccggtgataacctgattaatgtggatgaagctctggccggtgttacggttaatggtacttccagcaatgtgaacgtgggtcaaagcgtggttatcacgctgaatggcaaaatttataccgcgacggttcaggctaacggtagctggagcaccacgatcccgaccgttgatttagggttactggccgacggaaacattactttattcgccaccgctaccgatgctgcgggcaattctgttagcagcagcgccgatctgggcatctatctacacagcctgccaaacccacagatcaacacgccatttggtaatggcacattagatgcgagtgaggcggcggttactcaagctattaccggtacaaccggcgtcagtgggttggggcaaacggtgacagtgactatctctggcgtcgagtatcaggcgcaggttggtaccaatggtcagtgggcgctcaatctgccgagtagcgttttacaggggatcggccagggggcgcagaccattgatgtgactgctaccgatgccgccggtaacttcgctagccattcaatcccaattttcgtcgataccgtgccgccaacgctgactgtaggcaatatttccaccgataacgttgtgaatgcgttggaagcaacagccattataccgattagcggcacgacgtctgagctgggcgcgaccgttagcgttaccattaacggcatcacctataccggcttagccaatggtttaggcgtctggaccgtcaatattccggccaacatcttgaatcaattaccggatgggacttatccggtacgagttagcgtcgcggatgctgcgggcaatactaccgtggatacccagaatattaagctggtgactcaaggcgtgccggttccattcatgaatacgccgtttggcgacggatatttaaacgccgccgaagcgggaaccagccaaattctgactggcagcaccggcgtttccggtagtggtcaaagcgtcacggtaaacgtcggcggtacgcctcacttggtcagcgtggacagcaccgggaactggcagttggtgctgcaaagcagtgaacttttggcattgccaaacagtcacgtggcgattgtcgttaccgcgaccgattcatacggaaatagcgtggtgttgaacggatctgcggtggtagataaattggcaccgacgctgaatattgccccgattaccggcgataacataatcaacgccgcagaagaactggcacctttggccgtcacagggacgacagatgttagcgaagccggacgtacggtttccgtggtattgaacgggataacttacaccggtctggtgctgagtgacggtagctggagtgtggcgctgagcaattcggcggtgcaggcattggccgatggcaactataccttgaccgttagtgtgcaggatctggcgggtaaccaaacctcggtagatcgggtgattaccattgatgctaacccggctaatttaccgaccatcaccatcggcgcgatttccggtgataactatatcagtcgggctgagtcaacacaggacgtattgataaacggtgtaactgaacgcgtcgagcaaggtcgtcaggtcaccgttgtgttaaatgggaaaagctatttcggtacggtgcagccgaacggcagttggtcggtaacggtaccggccgcagacgctacgctgttgccggaagggccactcacggcgcgtgccaacgttagcgatttggccaataacccagcctcggatgttcatcaagtcacggtcattgcgtcgctggcggatcagccttctctgacggttggaaccgtggctggcaacgatattattgatttgcaggaaagtcactcgccgctgattatttcagggaccagccagcgggttccggctaatcaaacggtgaccgtgacgttaaacagtaaaacctataccgcgcaggttcaggccgacggtagctggcaggtcagcgtgccttctgccgatgtgaaaaacttgccgcagggcagtaataccattgaagccagcgtgaacgatgcggcgcagaacccggctaatgcgactcaccctgttagcgtggatactcaggcaccgctgctggtggtggacgtggataccagcattaacggcgtgctgaatctggcggacgcattgctgggcttggtggttcacggcacctgtgttggcgatacgggcctacaggtgaccgttaccgtcgcgggcaaaccttatcaggcgacggtgcagaatgacggcacctggactttaaccatcccaacggcggatttactgctgctgggtgatggttcgttggtcggcggaatgaatgtaagcgtcactgatgccgccggtaataaatccgaacaggtggtagatttgaccgtcgcggtgcatcaattaccgacgctaaccttcgacccgctgttcaccgatggcattctgaatcatgccgaagctgctgtaagcaccactttgaccggtgtcagcagtgggctggacgtggggacaccggtaaccttaacccttaatggtgtaggttatctgggcagcgtgacctcgttgggcgtgtggcaggtgaacgtcaatgcatcggtactaaccggtttggctgacggcacgctgcaagtttcggtttccgctacggatccgactaccggcaacccggccaacggttcggccagtctggatgtgctaacgcataatattccgaatgtcactttcccaaccttgccgtttggcgacggccttatcagtaaagcggattccgatttaacccagttattaaccggtcaaaccggcgctaccggtgctggacagacagtttccgtcaatattaacggtgtggactatctggctaatgtggcattgaatggtacctggacgctgtcagtgccgagtctgatcctcaccggtttgaccgacggttcacacactattaccgtcacggcaaccgaccgcgcgaaaaacgtgagcgtggaaagtgtagacttcacctcgattatcaacagcatgccagcaccgaccatcagttccgtcagttttggcaccgagctgaatgcgaccgaggcgctttctccagcgctattgaccggtactgtgggaacccccgggacttttggcaatgtgcagggtgtcacggtctttatcaacggttttggctataccgccacgctaccgaatccgcaggatggcacctggtctctcagcgtaccgtcagcaatattgaaggccttgccggacggttcatggccgattcaggtggtgaccaccgatgcggcgggtaatacaggttctgtgactggctcggtcgatgtactgattcacggtctgccaaatccgaccttcaatcttccgtttggcgatggcattttgacgtacgcggaaggcgcactgacgcaaaatctgaccggtaccaccggcgcgctcggggcggggcaaacggtgaccgtcgtcattgactcactggcggggttaacctttagcgttactgcgaatgcggacggcacctggtcgctgcctctgagttccagtgtgttgcagtctctggctggtggaaaccatacccttagcgtcaccgtcaccgaccgggcgggcaatgaagccactatcacgccgccgccgtttttatcgcagcagcaattgcctttgccaaccatcgatactctgtcgtttggcaccagcctgaacgcatcggaagccgctggtctgattattattcgcgggactaccggattgagcggtttgggccagaacgtttctctgaaaattgatattgctggtgtaagttaccccggcattgttgattcagtcggcggctggtcggtgaacattcctgccggtgcgttaggtggtttactcaacggttcccattctgtcaatgtcaccgcgaccgattcggtgggcaatagcggcagcatcagcacgccgttcgatagttatgttgtgttacctgttccaacgatcaatacgccaatctttggcgactatctgagcgccaacgaatcgaacgctggagtcacctttaccggaaactccggcactttaggtgcgggtcaaagcgtgaagttttacatcaatggctcagaatatacggcgaccgttaacccattaaccggattctggactgcgcctgttagttctcctgacttaaaactgttggtggatggcgtacaaaccatgaacgtagtggtgacggacgctggcggtaacgttgtgaatacgacccaagaattcacctccgttattcataatttgccgaccatcaccgttggagcttacagcttcggtagcgagctggactttagcgagagtcatactaatcagacaattagcggaacgaccacccacatcggtattggtcagcaaattaccgtgaatgtcggcagtctggggccgctaacggctaccgttggtgtgggcggaatctggtcactgacgttaacgccggttcaaatgacggcggcaagcttgggcgccagcccggtacatgtttctacatcttatacggatatggccggtaatccgtccacgggcaccgatctgccagactttaccctgagcctgacgccgccggcggttaacctaacgatcaacgcggttgctggcgataacgtcattaacgttgcggataatttacagggtttacctactgaccttattaccattagcggcaccgttactggtgcgaaccccttattacaaaccgttacggtattgattaacggcgtgccggtttccgtatcgttaccgattaccagtaatacctggaccactcaggtattggcctcgctgtttgccaacaacgcgacaaccaccgttgaagcaacgctggtgggcattggcagcccggcttcggccacggtatccgttatccgtgataccacggctccaacgctgacgctggctgattttgcgggtgacaacatattgaccatcgacgaatctcaaagcagcaagacaatcagtggcaccgcctcactggatgtggttgggcaggtggttaccgtcacgctgggagccaaaacctactttgcagaggtattggcgggtggcacttggagcgtgacggtgtcgcctaccgatctacaagcgctggcgcaggggaacgtcactctgtcagcctcggtgaaagacagtgtgggtaacgtgggtggcgcgagtgaaaccattgtggttgataccgtagcgccgcttattttgctggatgtcggtactaatctgttgaataacctcggcggattgttatcaggtacggcgaccggtgcggaaggtaaaactttgaccattacgctggggagcaatccggcaaacgtgatcaacgtagtggtgggatccgatggtaaatggacggccaatatcgatccctccaatctggttggtctgattaacggtccgctggtggcggatattaccgtgaccgatggcgtaggtaataccgcagatacccatgtgactcttagcgtggcgctcaacaatacgctggcgctggtggttgacccgctgtttaacggtggctacctgaacgccgccggaactttggtttcgcaggttatttccggcgttgccaccggagccggtttaggggccaaggtgaatctaaccctcggcggtgtgtcgctggaagcaacggtgggtagcaatggtaaatggagtctgacgattccgagtgcccagttaggtaacctcagcgacggtttggttcacttggatctggtgctgaccgatgctaacggtaacatcaccaataaagtggtggatctgaacgtactgagtcacttgctgccgagctttggaaccaccagtcaggtgtttggccccgatggcattctgagcgcggcggaagccttaaccactcagacgctgagcggtgtaattaacaacgttgcgccgggggcgttagtcacggtaaccgtaggcagtgccttgctgtacaccacggtcggcgctggcggtgcctggagcatcaatctattaccagcgttgctgggtggattacaggatggttcgttgcaaattggcgtttcggtgaaagatgtggccgggaatattgttaattcggcgctaaatctgaatgttttaactcacaacctgccaagcattaccctgaacccgatctttggcgatggaatcctgaatctggcggatgtatcgctggggcaggtcatcagcggtgtgaccaagaatctaccggctggatcgaccgtcaatattctgtttggcagtacgccacttagtgccatcgttggggcggacggtaccttctccgtaccggttccggcgggcttgctaagtgcgctgaccaacggcacggtgaatgtgaccgctaacgccagcgatgcggcgggcaacccgacatcgtcaaccggtgtgctgaatgtcagcgtcaccttaccgcaaattaccttgccagcactgtttggtgatggatccctgagtttggcggataccgcagtggctcagttgatatccggtacggtgagcggtgtagccgccggaactcaggttaaagtgagcctaggggggaaagatttcttcggcgttaccgcagccaacggcagcttcaacattactttgcaaccggccgatctgaaagcgctggcggacggtaatctgtctgccattgtctcggtgaccgatgcggcaggcaacaccggcaccgccaacggcgcgctgaatgtcattatcaacaacgtaccgaaactgatactcaacccaatcttcggcgatggtctgctcagtctggccgattccttactgccgcagattattagcgggcaggtggtcaacggtgtggttggctcgcaggttcaggtgacggtgggagccacgacgctgtatgcaacggtcggagccggtggaatttggagcctgcctgtgctgccaggaattctctccggattactggacggtacgcaaaacatcagcgtttctctcactgatagcgtcggtaacaccagtagcgccagcggctcggtaaaagtgcaaatccatgcactgccaaccctgacggtgcaaccgatctttggcgacggcgttctcagcgtggcggatctgttgacggcgcaaaccatcagcgggacgtcgaccaacgtggccgtgggaacgcagatcagtgtcacgctgaatggaaaaacctacctgactacggtggggaccggcggtggctggagcgtggcggtaccaccattggatctgaaagcgattctgaccgatggcagcatatcggttaacgcgagtctgacggatgcagtgggcaacccggcaacggtttccggcttgctgaatgttatttctaacgcgctgccgagcctgacgttagaccccatctttggcaacggtttgctgaacgcgacggaagcggcgctgactcaaactatcagcgggcaaaccaccaacgcggtgggttcaacggtgaatctgaccgtaggcgggctacatttcagtaccaccgtgggcgcgaacggcagttggagcatcgccataccgccgaccagtttgtcccagttgctggatggcactattggcgttagcgccaacctggtgaacgccgcgggtaatagcgcgggcgcggcagtcaatgtgacggtgggcattcacaacctgcctactttaagtctgggcaccttctttgggacggaccactacctgaacgccgccgaagcgttggccgcgcaggtaatctccggcaccagtactcatgcggcgggggggaccgttaccattaccttgggcggcgctacgctgacggctagcgtcaatctggatggcacctggagcgtgccaatcacgccatcggtgctgaccggattactggatggtactgccaacattggcgtgacactgaccgatgccgtgggcaatagcatcactgataactcctcctttaccgttaaaacccatgcgttaccgctgctggggattaacccggttaccagcctattggggatattgctaaatggtctggtggtttccggtagcagtaaaaacgtcagcccgcctgcgcaagtcagcgtgaccttgctgggccagacactacagggcgatattgctccagatggtaaatggagcgtgaaattcaccggttccattctgaatctactgaatctgggcaacctgctgactacgctggtcaacgtcgcggttactgatgaagccggcaaccataaagagttaaccgtcggcttgggcgtggggtctgtgctgccgctttctctgtcggcagaatcagaggctcaggccaccagctttatgctgaccagcgatactgacaccagccacaccaccacgtcagatcagcatcaaacggcggcgattaatggtgaaagtaccgataccggattacacactgcggctgcggcgaatacggtacaggcggaatccacgttggtcgaaccattggcgcagcaaatcgatagcatcctgatcacggatgtgaccgagggcggctacaccatcggcggcgttacgctgaatctagcggatggcaccgtgctaagcggtgagtcgctgaccggtagcgtcgagaacgatgagttcattctgaatactatggactttactcatatcgacggcggtttgggcaccgataccttgttgttgggcggtctgcatcaggtgctggatctcaccagtctggggctgaaagtcgaacatatcgaggttattgatttaggcaccagcgggactaacagcattgtgcttaatctacatgatgctttaaccatcactgataaaccgcaggacgacctgctgattaaaggtgcggaaggtagtcaggttacgttgagtcataccgaaggcggcgtctggagcagcgtgagccagcgtatcgttgatgggcaaacctttgacgtataccacaactcgtcattagacagcagcaatactctgggtgatgtactggtgcagcacggtttgcaggtgcatctggcctgaggctaagcggcggcgaggtgacggcatgtccctcgccgtatttttataataaatcagatggttaaacgctggattcatcagcgcgaaatacgaggttgggaagtatcggaatgggtgcctgggagcgcctttttcgcagggcgcaaagccagtcggcgtgactggctgatacatcagtacagcaacatgattctaataaagaatctcggcaacggagtcgtgtcggtgatgaaaaaaacacagcagcaccttctgccctggcgcattgtgggcaacttgttggcagtaggtattttttcaattggaattaatgccgctacgctggctgaaaatgtgccaccggcggcagtttttaactggcaggcggcacccagcgaggaagcccttgctgaactcagtctgcgggaagccattctgcgggcttttgcacgtaatccgcaaatcgctcaggcgtccgcgcaaattcgggtgggacagggggatttggacgtcgctgaaagtgcctggtatccgcaaatttctttacagggaacggcggggaaatcccatcaaactgattctgccggtagcctgaatagcaacgcttctgctggtgtgatgctcagtcagttgttgtatgacttcgggaaaaccggaggcagcattgatgaacagaaacaactctccgacgcctatcgctatgaattgtttaacacgatgaccgccgtggggttaagcactttacaggcctatttacaggtcaaacgctatcaggcgctcaccgccgcggccagagacaatctggcttctctagagcgagtcagagacattgcccaactgcgggcggatgccggtctcagctctcagtccgacgtattacaggccggaacccgcattgccggtatggtggcgacgctggagcaatatcgggcgcagcagcgctcggctcaggcgcagcttacggttcttaccggtgtggtttccgacaatctgccggatctgcctaaaacgctactcaatcagaaaattgctctaaacgcgattccttatgatgccagcagcgcggtgcggggggcggaatccaagcagcaggcggcaatggaacgggtacgacaaaatcaggcgcagcactggccgacgtttaaagtacaggcggggcgtactcgctatgaaaatgactcacgatcttactgggacgatcaggttcagttggcagtggaagcgcctctgtatcaagggggcgcggtcagcgcacgagtacgttctgccgaaggagccagagctgctgcgcaggctgaagtggaaaaagccaagctagatgtgaaccaacgtgcctcaaccgcttatgccgacatgattggggctcagcagcgccagctcgccggcgagcagcagttacaaagcgcgcgtcatacccgcgaggtttatcaggatgaatataagctcagcaagcgcagtctgaacgatttgctcagcgtggaacaggatgtattgcaggccgattcaatgcgtctgatggcgctgtatgacggctgggatgccaccgcgcgttatgccgctgcggtagataatctggtcgatatgttaggaattgatcgtgtggcccagagcggtgaaaaactccccgctctctgataaccgccccttacgcgattgaggtaaggatgaggtgtttaattgaccgtttctgatgaggcgacaggggtaacatgacagtacaatcaacgccaacggaggtttggatcactgcaatggcaagggttgccagccgctatggtcaaccggccgatatccatttcctcggccagcaaatgcgctggtatgaacaactcagctggccacgccagttggagcgactcagtagtttgctgggattacaggtaacgctggttccgatcagcaaagtccattggcgcaatgaattaatgccggtgctgctagagctggaaccgggcagcgtagcggtagtcgaaggcatcactgaagcaggcctcgccaattattggttgagcgacggcggcgatttggtgcgagaagcggagctgccagagctgctggcgcgcagtccgggcatggccattatggttggcattgccgcccgaggccgtgaccagcgcattgatgaatttgtgcaaccttaccgcaaacattggttttggcgacattttcgcggtgccggacgcaaaattgccgaaatttcgctggcgtcagtcataggtaacgtactggcgctggggggaattctcttctccatgcaggtctacgaccgggtgattccagcacagtcttattcgacgctgtgggtgctgttcattggcgtactgctggcggcggcgatggagtatgtcattcgactgacccgcacgcaggtttcggatctgatggggaaaagcatcgatctgaaagtgtcctccatgctgtttgtgcgtgcgatggcgattaagaacgaagcgcgtccgaaatctaccggttcttttatctcacaactgcgtgaaatcgatcaggtacgagagctgctgacgtccactaccgtgggcgcggcggcggatatgccttttgtgctgttgtttttagcgataatggcgtttatcggcggcccgttggtgattattccgctgctggcgatcccgctgattgtgattcccggtttactgattcaatggccgatggccaagctggcgaaagaagggatgcgcgaaggcgcattgcgtaacgccattttagtcgaaactatcgaaggcatcgaagacataaaagcgttgcaggctgagccgtatttccagcgtcaatgggaacaaactcatgaagtcagcgctgcagtagggatgaaacagcgtctgtggggcgcccgcctgaccggttgggcatcaacggtacagcagctaacctacgccggtatgctggtattcggtacttatctggttttggccggagatatcaccacaggtacgctggtcgctagcagcctgctttcctcgcgaactattgcgccgttgatgcaattaaccatggtgttttcccgttggcaacatgccaaaagtgccatgaccggtctggacgaattgctgaaaaaaccgctggatcggccagaagatggcgaactggcgcattgtccggtactcaacggccactatttgctgcgcaacgtgcaatacacctacgatgcggagaaagggcaaaatgttattggtatcggctcgctggaaatcaaacccggagagaaagtggcgattcttggcaaagtcggtgcggggaaaaccactttactgaagctattagccggtcaggctagcgccagcaaaggcaaagttattattgatggcgtggatatgcagtgcattgaacccgccgacttgcgtcgccagttgggctttctctcgcaggattcccgtctgttcttcggctccttgcgccaaaacctgatgcttggtcatccgcacgctactgagcaggaaatgcttcaggcgctgcgtatcagcggtgcgctcagtttggtacagcaggacgccgccagcttggatcgcattattaatgaagggggacgcggtttgtccggcggccagcgccaaatggtattgcttagccgaatgatattgcgtaacccgcaggtagttctgatggatgagcctaccgcttctatggatgaacagctagaagactatgttattcgccaaatgaatgcgtggctcaccgggcgcaccttagtgctagtgactcatcggccagcgctgctgaaattggttgaccgcattatcgtgatggaggggggacgggtgattgccgacggcccgcgcgaccagattctcaatgcggtatccgcggcagaaaaatccagacagggtgcagcgtaaggggaattagcatggcaaatttaggcttgcagcaagaaatggcccaacaggaacggcggatttccgccattatctggtttacgctggtggggatggtggtgatgtttgtctgggcatattttgccattctggatgaagtgacggtgggggtagggaaggtcacgccctccagccgtgcgcagctgattgaaagtctggacggcggtattatcgatgagctgttggtgcatgaaggtgccattgtcagtaagcaacaggtgctggctcgtctcgatcccacgcgttttcaatccaattatggcgaagctgctgcgcgggtgacggctttgcgtgcttcttcagagcgtttacgggcggagctgacaggagagaaactggttttcagcgccaaaaccttaaaagaaccggctttagcagcgcgagaaatgcagctttacctctcacggcgacaaaatatgatggaaactgtcagcaaccttcagcagtctctcaaactggttcagcaagagctgcaaatgacggagcctctggttgcgaaaggtgcggccagccaggttgaggtgatccgactacggcggcaagtgagtgagatccgcggcaaaatcgatgatgctcgcaaccaatatgcggtcagggcgcgtgaagagcaggtgaaaaacaatgccgatctggatgcccagcttcaggtggttgccggcaaagaagatcagctgacgcgcaccaccttgatatcgccggtgcgcggcatagtaaaagatattcaggtttccactgtgggcggcgtgttacaacccggcggtaagctgatggaaatcgttcctatagaagaacagctcttaattgaaacgcgaatcaacccgcgtgatatcgcctatattcgccccggattaccggccacggtaaaaattactgcttacgattcatcaatttatggaaatcttaccggagaggtagagtctgtatcgccagacacattacaggacgaagtgcggcgcgatcagttttactatcgcgtgtatgtacgcaccgacagggcagagttaaccaataaagccggtaaagctttcccgatattaccaggaatggttgctagcgtagaaataaaaaccgggcaaaaatcggtgatggattacttgataaaaccgcttaataaagtgaaggagtctctgcgggaacgctaattatttactgagaatcctcagtctacgctcaaaataaacccccaaaccctttcttgttgaagggttttatttcgtttgttaggcggggaattcactcggtaatctgagctttacgtgctgaaataaattaatgaaactatacatctcaataattatcacgtgtaactatttagcaaacagcagaaacaaatatcctcaatctctccttaattgtgataaataaaaaaagccgatcaagagatcggccgttaaataaacgtatttatagagatgctttaatccgaaatgtgggtaatagcaaaaataatgatgatagcggaattattatatcgtgatggcttacggtgtttcttatcaattagtgctaaaaatgaactccagttaattctttgattttaatgtattttttattttatcttgatttttggtgctataaataatgtattttatagttctgtgaaagttcgctcgtatttacattatgaaacccttagttgctgtattgaaacatgttcggctatttagtagcattttctgtatagattaatattattcttattaccacaatagcaatacccaattgggataaattgctcgtcagagcagtggcgataataagacataattaccgaggataataacgatgaaacttcgagttctttctctgctggttccagcattattagtagcgggtaccgcaggcgcagctgaaatttacaacaaagacggtaataaactggatctgtacggaaaaattgatggccttcattatttttctgataacaacggtgtggatggcgatcagtcttacatgcgttttggcctgaaaggcgaaacccaaattagcgatcaactgactggttacggccagtgggaatatcaggcaaacctgaacaaagctgaaagtgaagataacaaaaacttcactcgtgtcggctttgccggtttgaagttcgctgacttcggttcactggattatggccgtaactacggcgtggtttatgacgtcacttcctggactgacgtactgccagaattcggtggcgacacttacggcccggataacttcctgtctcagcgtggcaacggcatcctaacctaccgtaacaacaatttcttcggtttggttgatggcctgaacttcgctatgcagtatcaaggcaaaaacggcagtggcaccgaaaccaataatggccgtgatgttcagggtcaaaatggcgacggctacggtatgtccgtgtcctacgatctgggctggggcgtaagcgcatctgcggcgttcgctagttcgaaacggactgacgaccagaacgctccaggtatctatggtcacggcgaccgtgcggatgcctataccggtggcctgaaatatgacgcgaataacgtttatctggcggcaaactacacccaaacttacaacttgactcgttttggtgatttcaaaaacaccagcgctgacgcggcttacggcttcgctaacaaagcgcaaaacattgagttagtggctcagtatcaatttgattttggtctgcgtccttccttggcttacctgcaatccaaaggtaaagacatgggtaactacggcgaccaggatttggttaagtatgttgacgtcggcgcgacctacttcttcaacaaaaacatgtctacctacgttgattacaaaatcaacctgttggatgacactgccttcaccaaaaatgccggtatcaacactgatgatgtcgtcgcggttggtttggtttaccagttctaatcccgatggttctgggcaagatctgatgcagaacgcggccaaatggccgcgttttttacatacgcgctcggtgagtcggattggttgaggacatgcgttggggctgtaggcgaaaatttggggataaacgggttcttcagcgcatttttatcgttcccgctaagatttagtccggttttgaacaagatggaataagtaaaagagtgaagcgctgcaacagcaacgggttcagtcacaaaaacagaattaattttgttcaatctgactttttttaatcagattcagaacgaagtttgaccaaacgaattaaattcccattttttttaaatgaaacactagacatatcatcgcgctaagatgataatgccgcccattggaaggatggctgagtggtttaaggcagcggtcttgaaaaccgtcgactgtaacaggtcctagagttcgaatctctatccttccgccaaattcgccggcatagctcagttggtagagcaactgacttgtaatcagtaggtcccgagttcgactcttggtgccggcaccagcagtaagaaaaaagacatcttcggatgtcttttttttcgcccaaaattcacctcctgacctttgccaaccttcggctctatcgagctaatctcggaaagtctttatactgagccatcgcctatcgtgggcattatgcggaatcacctatgtttcccccgttaaagactcagcgttgtcgattgcgaaaaattcgccctacggatattaaacaggtttttgccgcactgtctgatccggcggtaattacccactacggcgtggcttattcctctctggccgccacgcagattcagatggattggtttagtaatatctatgcgcagcagagcggtatctggtggggcatttgcattgccggaaacgatcgggaaattatcggagcctgcgggtttaatcaatggaatcacgacgttcgctcgctggaactgggctattggctactgccagaatactgggggcagggattgactcgcgagtgcgtcaatatcatttccagccatgcctttacagaaatggggattcatcgtattgaagccgtggtcgagccggaaaaccgcgccagttggcgactattggaaaaatgtggctttcatcatgaaggcacgcggcgggagtgcgaaatcaaagatggcaggtttattagcctgaaaatttacagtcgcctggcaaccgatgaatatccggtaggattgccctgagaaatgaaacgaaagcattgctcgttgttgaacgctgtataaagaaactaaacataacaaattaatcataaaaaactgatcataagaaactgaagccgcgagcagccgttttagcgatgctgtcctcgcagatatgaagcagtccgatcattgatggatttttgctaatgagtaaaaagggcatcggtgagatgcccttatgcctacgagttattgatccgataatgattggatcgtgattttagcgaccattgctggctaaatcggctaccagctggttcacaccatcactcatattggtgaatttggtcagctgtgtgcgcgttaccacgacgaaaacaccgatgtttttttcaggaatcatcgccatataggtaataaaaccgccgccgccgccggttttttgaataattcccggcaagccatttctcggagccatatacacccagcctaaacccaaggcatcagcctgacccggtacgtccattccttttaatgaaaccagctcatgccgctggaaatacatcttttgttcacgtttcgccgtggcttttcttggactgttttgcgtagacaggaactgctgcatccagcgttgcatatcttctggagtggagtaaattccgccgctgcctgccgccgccgtagtattacgacaggcacttccaccaacgccaaccatcagtcgatcgcattgttcagccgtcggcgtcagggtggtatttttcatacccagcgggccggtgattttttctcgcagcagcgtggtgtaaggttttccagccgctttagaaagcgcatccgccagcaggtcataggccagatttgaataagccgcccggacacccggcggtaccgtaactttggcggttttcagccattgccaacggtcgctcttagtcggccaggtaaataccggccttttttgcgggccaccgggctgttcacgaggaaatccactggtgtggctagctaagctcaacaaggtgaccggctgtttagcgttatagccggggacataggcgcctttgggggcatatttttttagcggatcggtgagcttcagtttcccttcttcagccagtttcaccatgatttcgctagtcattaattttgtaatagaagcaatacggatcagtgagtcctgacgtgggcggatgttattgcccggtcgggtttcgccaaaactacgattgaccacctgattgttatctatcaccaccagcgccattcccattgcgccactgttataaaaaatatgctcggcgtgttgatccacaacttgtgccgttaaacgttccgtttgtgcataactgtgtaccggcagagtgaacagagccgccaccagtaaggaagtagagaaagctttcaactgtttttatccattttcaaaagcagaagggaaattcaccctgctatattagtcagttattgtcagaagaaaatgaagaaaggtgcagtagcgcaatatatttatcgtggttgaatatatagaaagtcggcaatggccatgtcacccgagctttttttactgcaaatcaacacaacatgttgatattaaataaataaaattttcaaggcctgtattcagttctgaaaacggtatcggattttattcgcaccatgagcgcgctggtgtttacccgcagaatttacttcaacgaagggaagggcgttatcaaggaggaaactttgtactacagccggttaggccggaagaatataccgtattgctgaatgaccatggttcccgcctgtggtggcatcaatggccgcacctgatttcgacaagaggccggtatggctaacgggttcgtaagcccctcattctttaggatgaaagtcaccgcccttaatcagcgacggttatccttgtgtcattggctttccgctatcggtttaattaatattgcggccgtttctttaacacccaacggattattcccccagcattgctcatattgccaaccggtaagctcttcagccaccgcgcgagcgtggggaggaatatcggctatagcgccaccggctttgatgcgggcaatctcttctaacaagatagcgtggttttttcctgtctaatttcatttgcgtggtataaaaaatggcgaccaacgctagcgcaatcactccaacagcaaataccccaacaatggcctgaaccgcgatttctggttgttctgattggccggaaacaaagccgaaactgctgagcctccagcccatggaaaacacaatcaccgaacgcaccatcttgccggcaaaagtcatggcaccggcgtaaatcccctcgcggcggcgtccggtcagcactgcatctacgtcggctaaaaaggtataaaccgtccacggaatgtagtaaatgccaccggtactcagggcgaatacggcggtaatggcgaacaatacaaccaccgtggtggtttcggaccaaccggtaaaatacagcgcggcgtaggcgattacgctaacaatcacaacccgtaatgcgatacggaaagggcgggcaaagccgattttgacgcaaacaccgataaatatggcggttgatatcagttgcataatcgaactgaaactgttgagttgagaaaccagtgtggcatcttgccccagaccaaaaataataaagtaggtaaatgctgaagcgaataaccattctgcaccgaagccaaacagatacattcctaaatgcttgcggaaaatgcgcagatggacagtggacgccatatcaacgcagagttttttcagcgcttgtcccaagctattggtggtttctctaagaacttcactggccggtcgttcccaggaagaagaatacagcgggatcattgcactacacataatcaaaccgtaggcgataccggtataaagaaacggcgttggcgaatctttcccgtagatagcaataaactggccggggataaaagccgacagaaagttggccactttgccaaaaattgctttagaaccagtgagtttggatcgtttggcaaaatctgtcgtcatttcggtagccagcgtttcataaggcaccataattgaggtatagataagctcgaacagcgcgtaggtcagcaggtaataccagaaaccaaaaccgctcatccacaataagggataaaccaatactagcgggataccgagcaggataaaaaagcgacggcggccaaatagacgacccagacgagtgttatagaaattatccgtgatgtagcccataactgggttactaatggcatccagaatgctggcgatggagaaaatcgtcgctgcttcgaccaccgttaacccacagaatatgctatagaaatacatcaaccaagcgccgcttatagccaatgcgccgctgcctaagaggttggcactgccgtaagccaaggtatgccgcgctgaaatttgtctgttcattcttatcgtcgaaaaaaataaaacaatattttatttatagtgttttattgtttcttttatatgagtttactttggtcaaaaatgagtcaaggatcacgaaacagtgttttgagtttgaaagagacgagtaacctgataaaagttgatataaatcaacctaggctataggcatgaaaaacatgggtgacatcatatcgatgtgcccaacgcggcgttagaaaagtacaggctaatgagtgatggctattttttcgccgcaatacggtgatgaacgcggtaattttgagaaattggatcgtgatttttagtcaggttccaattagccaaccgatggttggagcgggtagaaataacgttagctgacgctgcctatgaggctgtaagccacatttgaggaaagacatggccagaaaaaatccgtattacgatgccagcaagccgcatcacaccgaattcgggtttcagaatctggagccggtggcccatcattcgcgggatctcaaacgttggcgcgaagaacggaaacgtcaatcattgcctaagccgccgtcacaggggtatccggcgtttattgcccaatggtggcaacaggccgagtttagtggtgaagatgatgctgcgtggtggttaggtcatgcctgtgtcttattgcgtatcggtgggcggacagtgctgtttgatccagtgctgtcatcgagagcctccccactgcatttctatggcccacatcgtaaaacgccagtcccgaccaaggttgaaggattaccgaatattgatgtgattgtaatttcgcataatcattacgatcatctggatgccagaactgtcgcccagttattaagacattctccgcaggtcagttttatggttcctctaggtttaaaaccttggttgctgaatcacggtgccaaaattattcatgaattggattggtgggaaagttatcaaatcgccgataccgagtttcattgtgttccggctcgccactggagtatgcgcacgccttgggatcgcaaccattcgttatggtctggctgggtagtgaaacagcaggggattaatttttacttttctggtgataccggctattgcccgcagttggttgaaattggtgaacggcttggtccttttaactatgcggctttaccgattggagcctatgcgccgagatggtttatgctggcgcagcatatggatccgcagcagtcggttcagctttaccagcaattaaacgaacctgttaccattccaattcactggggcgtttttgagttagccgacgaatccttagatgaaccgccggaacagttagcgttggcgctggctgccgctgattgtgataaagaccactttaaaccgattaaaattggcggccgtatcccgttaatagcctaactcattgaggtcatagccaatggcttagcgcgctgtggttccttcagataaccagggtgaagcagtactccagaaaattacattcgcacctaaatagttctctgcataatcggtaaactcagctttggtaaagggtttgccggttttagcattggtgtaggtgagggtgggttcctggacggccattccaaccagactaagcttgcctttgtattgattaaagaacggataggcatttttcatctgcgcttttttatttggtacgatatctggcccgcccagccccaccttgtttttcgcagcgaattcaaacaggcgtgacatgtattgatgatcattattccattcacaaggccaaaaattgacgtattgcaccacatgagatttagagaagactttacgggcaaaggccatattctccatctctgcggcaaagtatttatcgcagctaaagccggatttatcccttttaatatcggggtcaatggcggtttctggcagattgacgccaaatacccggccgtcgaattttgtagctaatgccgccagtagtttttgatagcgttgttgtaccgccggattccactgctgggttacccaacctgaacccgcaggcttattttcgccgggattatcatattgcggtacgataccgccgttatagcgcggatctttcattagataggcaggaacgtttttagcttgaggctcaaagaaacgatcctgaatttgaataaaaagtttcttatttaaactattaaggtaggcaaggtcacgctcgatctgtgaaaaatcatactgatctttgtcggtttctagcgccttccaattatagacaatttgtactccgccaatatcaggccgctgaatcagagaggaaatagtcgttaaatcgtctgaaccggtatacagaaagttttgcggtacagcgccagtggcagcataggaaaataacgttattagcagaccggcgtgtaataaaatatttcctgctagtttcatattcttccttaaataagttgggctaattatttttcgcgagttaacggcgataacattcgcagcaatacattcgcagtaataaaggtaacgcaattaaacacagagtaattaaacgtaaagtaataaaactggctgatagcgtacacggctaggtaccggtattcagccctcgtagcgctcgaatagccttaggctcaagatagactactgttctatgactgctaataatacggcttacaatgacgttgcgtggcccggtttgccacgcctcgctgcggtagaactgtgcctgtttgcgctcaagctctgcgagattggcgtatgagcgaatcagataataactgtcttccagttctacgcctttgccataagccactacgtccataccggctttctgatgcagtggaatactaatatcctgcataacccgatggaatatattgccgctatcgggctgtaatttatatagaagaatttcgaccgttcgatacatgtctatctccggatagatgcagatcgacggagattagctttccatagtcagccattcgtccgcttcttcaaacatctcttcgatcaatctgttcagagcagatttttccaacttggtcacgcccgatacgttgagaccgttggcctgcatggccttaacgtggacgtcagcctctggatgaatccgatgcacacgtttggtcaactcttctttgatcaaatcagtggcgttggtcagaccgccgacgtttcttttgtcataaatcaattcaatacgcatatcttcccctaaaaatgtcaggataacccattcaaaaacaactgggttaatatacagtattggcgcgttgacaccaagccggttttttctgctgccaggaatttaggacagtatgtaagactgaacctagcgatatgtcagggtaaaactcgctacgctattggccgcccccggcgtgattttgaccccggtttggtaataacgagcagtcatcgggatttcattagctccaaccgtggtgctatcgagtaaattcgtgggcgcgcccagcggaaggggattgccatcatacaggatctgaattcccagaccgctagccacctgttctcctgtattgccgtttaacggcaatacattgtcgctactgccggaagtccccagagtgagtgaaactttggtgtcaacttggcagtccagcccgatggtaaatgggacggagcggccatagctgccggggccggagaaagaatgactattgacggtacccataggaacctgaatggacggcgtggtggtgttacagccgttgacctgaatatctaccgctgggaaggatatttgacctaaacccttgccatttgtgatacccagacaggtgtaactcacactgaccgggttatatgccggcaacgtgccagaggttatatcggcatatttcaccaggaaatattccagattggtgcgcatcaaatagccttcataggtgtactgtggtgcgtaaacatctagcaatccgtctctaccgtcggttctgtacgcgatgccgacgccttcctttgaagttttatacactggcattgaatcgtaatagatgcccgtccatttagtggatgttcgtggttgaagaacgaagttccccggtgcgccgaacgagttgttttttactacttttaccgcatagctataaacgccagaggcaagtaatgagcctatcggggcattcattggaacggtaacgggtccctggctggtactggggtagatatcccacaccgcccagcattcagcttcggcataacttttgggtgtgaaaaccaacgtcagcagaagaatgagataaatccctttttgtcttatggacaacattttcaatctattcagcataaatttctcctgctccatgagagagtttccctcattaagataacgggggaatagtggttagcgttttcttttccacttaaccttccccgtcatctctccattgtggccaataaatattataaatttcaatcaattagttttttttggccggattttagccagcttatccagtcgcgtatattccggatttaaatatcaataatggcggcttatttttcgctgcggctgaaactctggatcgggctgatgagtaatacggttacgaatatctcttctgaatatttcgatagtccacatccacaccacgtgaccgaacgtttcggataaaagctcttcaaaaggcaggtgccacagcggtgggccccagccgaaaagtggtaacagcacgccgtggaaacctaaagtgaccagaatggcaaaagccgcgccctgccagagtttgatcgtcgggaatatttcagccactaagcaatagaacagggcaaacaagatggaaaatagctgatgaacgcccgccacgccccagttaataatatggcctgaatattgatagatcatatcgttgaccttgaaacccaaatcttgcagcatctccgccggcggaatggctctgtccgctgtccttgggggaaaagggatctccgctccccatttgacgaaactggcaatattcccgcctaaaaaaccggcccatagggcggcgctatagttcctgtattttttctgtgtagtagcaaaacgtaattccataaatattccttgtttaaaacggccaatacttcggtttttaggctgaatattttattaaattatataatttaataagttagagcctgttgaatcacccttatttagagaaaagcgaagatcgccggatgagaaatagtgttccgagtgatgaaaaaatcgcttttatctatcatcttttatctatcatgctgtgttgctcctgtcctcaatttcccgaaatgacaatatctatctgaaaaatatgaactttatatcagtaattctctcgtagtgattgaccaatcatctgctacctgtaattcagcgtaatattggccgtgctgctggctcgacctgcgttgataaactcttctttctggtaataacgggcggacagtagaatctgcgcgcagcctgtttccgagaatgaaataccgctaaacaggtcccctaacgtgataggttgcccgcggtataacagttgaatgcctattccttgcgccgtaccattgccgctatctaatgccagcaggtcaggcgaaccttcaatgccagcgccgccgatcgctattttgattttgtccgtggcggtacagttgagtgggattgaaaacgccacttcatttgcagtgctattcaggccggaaaaggcgcttatttttacccgttccaaaggaatatgtagctttgccttctgaacgccacaggctcgtactcgaactgaagccccgtacatcaacccattccagtcgtaaaggccgtttcccccgctggcgaagcaggaataaccgatgttgaataatttatggcgtaatagctttccccccgaaattggcccgtacttaaccaggtaataatcaagatttgaggatatggcatcgcccctcaggtttttactgttatgggttatttgccgcgtttcggcgccaccttttgttggcgtcacggtataggccacgccaacgccctccagattggttttaaatacactgattccgcgatatttaagcccggtaaactgagttagcggattgatagtgataacaaaatctcccgctgaacccgcatacgaattatccataatacgcgccgcaatatgggtttgcccttgagccagcaggctgcctatgggcgcacttttatccacgtataccggtttgggaaaaaccagaatcggggcgtgagtgaggaaagaacgacatccggccgctccctcccgcatttcccacatcatcaacatgaaaaataaggtgatatagcctaaatagcgcggtaatctccgagccctcatccttgctccttgcctcaaaatggcggccgcatacgtttgaccgtcctttacttagctatgtcattaccgctttacagctggcctgtagggtcagtaccgatgaaccgttatcgtcagaagtttctggtaggatgtagtccgccacgcacttctgcggtgtgccgttgctgtcccattccaccagtaaacttcccttatcagggataccgctcaaataaacctccgcattattggcgacaattccgctattgattgataggtcgtcattatgttttagcgatgcgttggcgccgaacggaatggtttttccatcgaagttcagtttgattaacgctcgttttcccacgcgggttttgaaatcagccagtacaacggcacctttggtcggcaccacggttttgacactggtatcaatatcaatgttttcgcccaaggtttgggtgtccagcgcaattcggtttttacgataagtactgacataaggaacgaccgcgtaccctcgccagtcggtatagacgccgctgctattttgcaccttcactccgctggctcccggcgctttaaccaatgccagtgtctcaccttgggattgcgagaaagtgacaccgaatggatgcgcaaccacgcctccgcgcaggttatagttcaggcggcgggaatcgttgtcatagctgtaaccagagccgatttcgccataggtgccgcgatagttggcgttaaggttgccgctggcaccgttgccctgattagtataattctgctgaatgttgtaattcaggttgttgtccgccagcgcggtgccgctcaaaccgagctgctgggtggtacgcccggatttgctgtggttgacgttgtaggtagaccagctgttagctaaccaacgatcgagaggaacctgcacgctgaaagctaacacactgtcgctattacctacgcccggtgtctgggtgtggctatatgacagactgtagttaatgcctctatgattcaggttataaccggtgctgatattgcgttcataaccagattgccaccaataatcctgctgatacccagagatataaagatgaccgtatccgcccatagactgattaaggttgagctgtattttgctgcgtttattgtagtttgggcgccagccgttgacattttcccgatattcattagtttcacttaaggtataaaaaccttcagtggaatagcgataacccgccaaagtaaaattggtattagtggtactaatatctttggaatactggaaccgataagactgcccctgggttttttttcctcctctatgagaagtattagcctgagtggcatcgagagatatcgatcctatatcgccgaacccatgaccgactcctagcacgccggacgtgtatttctctgcagccaatactcccccgtacaaagtggtgtctgcgggcaacccgtaaatcagggttgactgggcaaagttcggcgttgccgcaaaaggggtggtagtgcgatatttccctgccgtaacggcatatttcaactggccttcgcgctgcataataggcacggcggagaaaggctgcacaaagctacgctcagtaccatccgcttcccgaatagtgacgtccaacccaccgctggatgaggttgggtagaggtcggtaatggcaaaacttccgggaggaacataggtttggtagatgatatagccgttttgtcgaatgatgacctgagcgttactctgtgcgataccgcggactaccggggcaaaaccgcggcggctatctggcagcatattggtatcggaggctaactggactccgcgaaattgaacgctatcaaatacttcgccgggcgtcgaactgtcacccagggtcagtgcgcctttcagcggctgaatatcccgttgtacgtaggtattaatgttcttccactcacgcccactcttattattatcggtgtaggtggagtagttacgtaaccgccaggcacctaaattggctccgctacgcaagttaagataatagttactgttagtcccttcactacgcgaatcccaggtgttagaaccggtaaagctgtagttaaccagcgcggcgggaatcccctgattccataactttgggtcaatggcatcgcgcgcttcattattaagcgccgcttgtggaatgctgatatccaaccgctggcggttaaagttgaaacgagtgaacgcttcgggaatatgttgatctaaattgctgaatgcttgagtcggcggtaacgttttaagtgatgaaaaagcctcaatattgacacccatcgcagccaattcttttgtggttaattccggcagaagcttgccgttacgatccacaaaggtcaccgagcgttcatcgactttgctgtcgtttaggtaaatatccacccgataggttccgggaatttgcgaaccggtggtagaaaactgacccagactgacgttctgaggtgtaccttctttcaattcaagcgcataaggattgaaatagtctgctgccgaaacgttgactatcggtgcagcagacgcgacagagactagagtccaaaggatatgccgggtgagtcccgctggcttgcaatgtttttccataacaaaattcctccatttggggccgaaaaaagcgtacggataccccttacccggtatggatgggcaagatgtcatttcagtcaggattaggttttgcgaattagagagaaacggtctctttggctgaaatgccaccgtaatcggtaatcgcctgccagcttatctgccctgatgcgcctgaaggtaacggccagctgcggctgcttttcggagcgatcatatccgcttcttttatctctgatttcccaacgttaagttcatagaacgaaacgtaatagggcgtgggattaaccacttccaattgattacctttacgcttgaactggagagatttataggcatttgcagcctgatttctcagcagcccggttggacgataaaataatttgatacgcgattgaaccgtgatttgtagctgattctcatcggttttatgcgttgccgggatagatttaacgctgagccagaataccgactcgcgatcttgcggtaagttaccgccggcccgaacaatacgcagcgtattctcttgctcggcatccaatcgaaacaatggtggagtgacgataaagggaatcttagtcgtgtttgatgcatccagattatcgatccaggattgaatcaggtaaggccgatccttttccgggttggttactgataaagaagcctcttttttactgccatcgtatatgacgcgtgtgctacctataacaatcccagcctgagcctgataggtaatcgttagcaggcaacatacagaaataaaagaacgtatccatgacataccagaattcctcataactaactgcccagcagattctctgccggtaaagatatttttcatgtaaaaataagcatccttgcctcgcccttgaaacatgggtgatccttttgtttgtattttttaaatttaattaaccctaactaaagcagcgctattagttataggaaatactaaactgagtgactgcattagctgggccggtcgtgacagtggcattggttgacatatatttggcaatgtagctaaagacgggattcacacctttcgtcacggctttttgcgcggaaggagccgtcatgggaatcagagttgtaccgtctgcttcataaattgcgatacccaacccagtagctacgccagtttcagtggtcaacgcgagcagattggtattattttctgcaaaaggaccatcaaactttaccaaggcctttgtcactgaatctggacaagaggtcagggtgatatcgaattttgccggcatggcagtggcaccgaccgctgggaaagccttggcgctgacattacctaaagcaaccgtctggctggcgctcgctgtgctaacggtacaagcttcagcaataactgtaccggtgaaattgatggtgccgtctgctgcatttgcagcatgagagaaagaagcaaatgctgcgctagcgagtaaaatagttgcgcgtaatttagtgttcataaaggtctctccatttaaataaatcaccctaatttacatcctaatttaggggcattttctcagcatttaatctcagtgaaataataggagccttgtctacttaatagtatttgtaataaaaatactattaattttttttgactacctattctccgacttacgttgatatgactctgcgtagggtagtttccattttctcacgacgtaacatttttaacaatcacgtcacatttgcagtgtcatattaacggagcataggtttacacaaaagatcaaaatgtaaaaactttatatcttttttaagtaaaattaagaataaaaaactgtttttatcaaataacgctgttccaatgaggtctcacacagttacattttgaaatattgaggtgattattctgacttaattcaaataagcattatttattaacgaattattattaaatatttgtcattccgattgaatgaatttatggcgaatatttagacaccatgcaaaaaaagtcttaatggattttagtggatttaatgaacttaaaagaataattccccgtgcagagatctccgttctgattaattgatttcgtatcttcgcgatataaaaacggagaaacttgagaataagatgtgatctcaattctattttccatagcacgcttttctgcctaaaactattaaataaatcatcttgttgatttaatagataggagtgggttgttagtcatatattttgaatattcttcaaaataccgaacttaacaggaaaaaaaatgagtatgggcggatgagttaatccaatgtcattcgtaaacagagttatgtgattttgagtttacaggatgtttgtctcaatgagagtcgttttcattgcaaccgattatttacacaaagagagtatggttatcgttcgctttttctaagattaatcttagatatctatataaaacaatcgccatatttaattaattcaattagttacattaatgagcgttaattcaaaggttacagggagggcaatccagcccaatcagaagaatcggccataatattgctgcataatcagcacgattgcccagataatttgattggataaatatgcactacgcaaaatgacctcaatagcttgccatcttaaagaaaccggtttcggtaatttcaatcgtcagcgactcactattgaatagaagtcgtttaccagtgcctgaatcggaggctgagtgcatcatttgactgaaatgtaaggttacggatgccgaatcgctcgcagtagcatgttcttttcatcacacaaataaaccttgggtaaaatgcgttttttttatacatttctgctctgttgaattgcttctggtagaagtgaggaagtcggcgcgagattctgtccgatacgggtgcaaaccctcagatgagggagtgttagcttaaaaattgttctacgtaggcttaacgctggcgagaggttgtgaaaaaatcagcaaaccaatcatcaaaaagttatttggctaagtctcctgtagaggctgaaaagcgcgtaggcgagttttggcaaaatctgcgtgtaacttctgccaatcttctcccagattcttcgtaacgtcaccggtgataaaagtgcttacatatcaatactttaatttattttttcgactttatcttgtcgcgtttatctaaggtttaataatttatgttaagagttggcaaattttttagcactaaattctgctaaatatagattcatagtttatttgactggcatgttaagtaacggctaatcggggtgtgtttagtagccaccgagagggcttattcactacgggaacatttaggagccatagagatttttctaactccataaatgcgagcttcggataaaaggttattttcctctacttctctacaaaagttcaaaaaaccattgtctggtataaaaccggtgtaaataactacctgaacatgtattggtggttttattactttatctctaaattgagatgtagcgcatcgtattggccttgactgagtgtggttaatgcgaaacgcataagtcttgaaagtatcttatgtgggcttagaggcgctgtaagcgaatgtttggctggtattcactcaaactctgactatcgaaataccttcttaaggttttgctaatgaatgtggggaaatgagaacttatttctcttagattaaaaagtatattagcaccaccgtagcgaatatttgttcattttcagcgcgttaacgttcggttctgattgcgctgaagctctaagagcgaaaattgcagcgaacttgttagattactttattttaccgtctcggtagcggttatttattacccgtctatggccagtgttatacacagggaaaatagaagaacagaatgtagacatacctgcccggaactgaatattgcgcggctatgctctgctattgtgaaggtttgttatttttgtggcgtattgtgagtatcccagatccacaggtgatcatgggaatctggctaatgactgatgcagcggctagacgtgtggcgtgggttgtctattgatgctgacctgaagttgggggcgttatcctactcgccatctgaaatttacatcggtgtctggttgctaatttctttggctggcgggcaaattctggcggccatactaacctaactgggcacctagtggcggtgggcattacctttacgattttagcgattacctgttgtaacctgcggatcgtatccaggagctattttatcgtcgaccatctttaagcctaggcaactttatcgacttcaggcttttcaatatcaatagtggggatgaggtgcaggtagagtatttcgcgttactggattcggtcattccaatgtttaagtctgatcaaaccgatcttttgccggttgaacagccagagattaagtcatcattaactggggaggggcacggtataattcagaatgtctgatgaaggttggttgactctacatgacgagaaattgcagggatagcgagcgaataccgctattttaccaatagtattgaccggcgttatttgtgaaaggcgtaaaaaaaccaaccacaatgggttggttttaaaaagattctttggtcggcatgagaggatttgaacctccgacccccgacaccccatgacggtgcgctaccaggctgcgctacatgccgacgcagtaaatttatactacattttctctccgatattgcaagagtcgggcgtaacgttcgcttgattattaatcagttaggctaatgtcacctagttggcaataaagcgttttacgtcggttagcacctgcaataacagcgccagctgcggtttctcatctttcacttcatggccttgcaggtcaaaggttcgataatttccactgttgtcgagcacaatagtttgggttggcgtagtaataaccagcatgccgttttcaccggtagcaagccaattatgaatccgctgagcggcaaataaatcctcaccctgcgagtaatcttctggcgaagtgcgtacatgcagtaaacgctgcatcagcgtcgtcataacatcttcatggctggtcagtttattcactttttgtgctggagtactcggccagtgaataatcagcggaacctgtaattggtgacggttaaagttgctgccagccccccaatcaccgttgccactatcattaaattctacgccgtgagacgcggtgatcaccaccacggttttatccagcaaccctttggttttcaaggtatcaatgatagtcgcaatttgctgatcgacgtttttggcaccgtcctgataatggctgataaagtcatttggcgcggccggattgccaccttccaccgggtcctgcgattcttgtgaaccaatcaggttaacgtaggagaaccaaggcgccgggctggataaattattcaaccattgttgccattccagcgttgtcgcgctgtcgctctgacgttttggctccggtaacgaaaaatcggacaaaagagcctggcgatagagcgccgactggaagccgtcagaggagaacaggccgaactggtagccttgattacccaaggcattaataaaggccgaaggttcacgggcggccaaaatgccgtccaaatacgtcggggaaatcccgtaaaacagaccaaataggccggtttctttccggtttcccgcgctgtaatgacgattgaactgaatattatattgagcaaaatcattcagagctggcatgtcctgcttcaaactatcagggcgaatcccgtccacgacgatcatcagtaggttatagccgctgcccttatcgctaaaggtaatggtattgagcggatattccacggtaacggcttcgggatttccttgttcgataatgcggcgttgatattcctgttgatccagcaggccgtgtttctccagaaacttacgcgccgtcataggataggaaagcggcagattggcacgctgcatggtgattggccgatagaaattggcgtccgcccagatataaatcaggtgggaggcgaaaaacgcagaaataaacacggcaaccagcggtttaacgaacttttgccggttcaggctacgcagcttttgccagcaccaggtgccaaaaagcatctcaaccaaaaagataataggcacagaaacaaagattaactgccagtccctggccaactcgctttgatcggggttaaccaccagctcccacaccaccggattgaggtgcaagtggaaacgggtaaaaacctcactgtccaccagtaatagggtcagacctgtagtggcaaatgcggcggaaaggaacctgagtaaccgctgcgacatcacgacaaaggtgagtgggaaaatcaccaatagataggcagcgaatacgataaaactgaaatgccctagccaactgaccagggcataggtacggccaaccaaagaggctggccaatcggaaacaaatagatagcggctgcccagcaccaggctaaacagaatattgaataaggcgaaccagtgcccccaactgatcatttgggacactttttcacgatagcgctgacgatttgtcaccatatagagatagcagtcttaattaagtaattaatgagctttatcttcacgtaccgaagcctgaagagcctcggcgaaagatcgcgccaataccttgcgttgcgctggggcaatgctggtattgagcagatttgtaaccatattccccaaaaccatcaaggaaagatcggttggggtgcggtgtttttccagtacttgaaccagttcagaaagcaactgttcaacgtgttcgtcactgtaacgagatgattgtggcataaaaagtgtgctcaacgcctgacaaagtcccacatcttaccgtatagagccgcgcttttccgctactttatagcattaagaatcaattgcagaggattcggcgttcacgccgcttttgagttgcggcatcagagcatcggtgtttgaatacgcccctagctaaaaggagtatttatcatgagccttgatatcgaccaaattgctttacatcaattgatcaaacgtgacgaacagaccctggatgtgatgttgcgggactctttactgccgactaatgcggtagttgaagaaatgatgacggaactgcatcgtgtttatagcgccaaaagcaaggcgtatggtttgtttaatgagcaaagcgagttggccgatgccttaaaacgctgccgtaaaggagacgaagattttctcgcctttagccgcgcggctaccgtgcgtctgcgggatgaactggcgaaatatccttttgccgaaggcggcgtggtgttgttttgtcagtatcgctatctggcggttgagtatttattgatctcagtgctaagcagttgcaacagcatgcgggttgatgagcagctagatttgagcacaactcattatctggatatcaatcgcgctgatattgtggctcgcattgatctgaccgaatgggaaaccaatccggagtccagccgttatctgaccttcctgaaagggcgcgttggtcgtaaggtttctgacttctttatggatttcctgtctgccgccgaaggcctggacaccaaggcgcaaaaccgcggtttactgcaagcccttgatgactattgcgccgatgcgcagttggataaaaatgagcgtcaggcatatcgtcaacaggcttatagttattgcaacgaacagttgcaggccggcgaagaaattgcgttgcaggaactggctcaggaattgcctaaactgggtgagaaggactttaaagagttctccaccgagcagggttatgcgctggaagagacgttccctgccgatcgtagcactttgcgacagctgaccaaattttccggcagcggcggtggtttaagcattaacttcgatgcattattgctgggcgaacgtattttctgggatccggccaccgatacgttaacgattaaaggcacgccgccgaatttacgcgatcagttacagcggcgtttgagcggcggcgacaaatcctaaaatagccgctcactgctcaagtgttatcgacgtaacgccacggagtctggaaacctttaacattggtttctaaactcggtggcgttatttttttattacatatccatgaggtgagtttattgtttgttttctatggttaaatttaagtgagcttaaatctttattattacttttcattaaatcctattagttaataattttattggtggcttcatggtaattccggatgccattgtttatttattctaatttgttttttatttcactcaagcatagtcttattgctcaccatggtgatgtttattttcatttaacttaacttaatttaattaccgaggatttaaatatgaagacaattgaagctactgagttaaatcttatttcaggcgcattagcaggagatgtaccaactcctgcgatggatatgacaattgctatcaccacggcgactgcggccggtgctacaactggcgcattgtttgggccgattggtgtagccgttggctctgcaattggtgcggcaactggtgctattgcatcaatgggatggtaacagttttattaaaatacttaatgctattgttttttaaatagacatttagtttgttataccggcttctctgttatttatagcagagaagctttaatgcatgtaaaaataataaatcagaagtgaggtaaatattgcctattggctgatctttcgggtggtgtagtatttatttcttgagtagcacgctattttaattggctttgtatgtgttttcgatcgaatcattaatagccagcagcagaaggtaataaaaatagcagctaataaaaatgccagtcagagtaaaccgactggcatctcccatcgcatcagcgatgctttctcattttcggcgtcccgaaatatcgatatcgcagattaaacgcgaacgaaatcgatatgagtcagttttggtttgaaagcgtgacgctgaacagcctgaacctgaactttaacttctttaccatcgataaccaaagagattggctcgttgtaaaaacctggtttgacttccatgtttttagtggtgtcatggtccagagcgatagaaaccgctgcttcctcgccaccgtaaacgatagctgggaatttatttgctgcacgcaggcggcggctcgcacccttaccctggtcgttacgtacttctgcattgatagtgatcattttgttttctcttaaaagaaaatttaccctgctacaggcgacccagcaacaggttcgatagtcggcttactttgggcgaacccagagtaaagcgggcggcattctagcgaaatatcgaccagacagcaaacaaaaccgcaaataactcagggcagaaaggcgctagccaagggcgtttgccaggcgaaaacgcccctgataatcaaaaaccttttcgcgaatttgccacccttggccccgtttccgggcaacgacaaaatcggggtgacgcagtagcgcctgctgggcgatcacgtccgtcgccgtttgccattttaaggggattcccggcgcgcgttgatggggacgcagaaatatttgctcaaaggccatacgctgtgcggacgtggtgaggcgaaagcgttcgctggtactggtgccgtcttcatcgtaataagtgattttcagccattctcctttggcatccttgcctgattccagcgccattcctccacagcgcagaaccagtgcatctttcagtcttagcgcggctttgagcatatcatcgggatcgaccagcacttcctggcactgatgacagcgtcgggcggcaatgtcattttctgctccgcaatgtggacagcttttaaaccggaaacgatagtcacattgagcgcgctggccttcatcatcttcaaaccagccctgacagcggcggccatagtgttcgataatatcgccggattcagtgcatttcccccaaaatacattggcaaaaccgcagtctgggcaaaagacctgtaccggctggctgtcgccatgaggtttactggtacccacttcgggagtgaacagatcgtgtggattaccggcgtagtcgagaatcaagcagtcttcctttcccggtgataatcgtaacccgcggccgacgatttgctgatacaggctgacggattcggttgggcgcagaatggcgatcaaatccacgtggggcgcgtcaaaaccggtagtcagtaccgccacattcaccagataacgtaattcttgttgtttaaacgcattaattaacgcgtcgcgttcggcggcgggggtgacggcgctaatcaatgccgcctgtcccgcggggagcagcccgtacacctctttagcgtgctctaccgtagcggcaaaaatcatcacgcctttgcgagtggctccatattcgacgatttggctgacaatatgcggcgtaatacggctttgctgtttgatttcccgatccaggtcttcctcgcgaaacagacccttgctattactggtcagacggctgaaatcatactgcaccaccggcatatccagccgttctggcggtaccaggaaaccgtttttgatcatgtagcgcaggggcaattcatagatgcaatcgcggaataaactattttcatcaccacgggtaatgccgtgatagtggaattgataaatccagcctttgcccagacgatagggcgttgcggtcaaacccagtaagcgaagcttcggattgtttttccgtaaatgctgaatgatttgctgatattggctgtcgtcttcatcgctgattcgatggcattcatcaatgattaacagggaaaaggcactatcgaatagtgagagattacgtgctacggactgcacgctgccaaagacgactttgccttcgctttgtcgttgctgtaaacctgcggcaaaaatatcggcatccagaccgtaagcacaatatttagcgtggttttgtgccactagctctttaacgtgggccagaaccaatactcgcccgcgagccagtttagccagctcggcaatgaccaaacttttacccgcgccggtgggcagcacaatcagagccggttccgggtggcggcgaaagtgagcaatagtggcgtcaaccgcttcttgctgataggggcggagtgtaaaagccattgcttaggctaccccaagcggaacggtggtcatttgcaacatatccttaaggtttttagcgaaatctatccggttaaactcgacattattttctattattatgcctattcggtgccataggtgcgagaacctctcggtcgggtgtaactgttcctaggatgataggacaacccccgttatactgatgtgtctcataggcagcaaatgatgttcctcctacacgatttttactgcttcatttaatttccagcgttgctactcctcaaagtggcaaggcaacgtgttgattagcaacacgaccagacaaacaggcaaagtagattcaatgcgattggacaagtttttatctcagcaattaggggttagccgtgcgttggttgcgcgcgagctacgggcaaaacgtgtgaccgtggacggcgaaatcgtcaaaaccggcgcgatgaagctgacgccagaacaggaagtgatgtttgatggcaatctgctgcaacagcaggtggggccgcgttactttatgctgaacaagcctcagggctatgtctgctccaccgacgatcccgatcatccaaccgtgctgtatttcctcgatgagccggtggcctataaattgcatgcggcggggcgtttggatatcgacaccaccggtttggttttgatgactgacgatggtcaatggtcacatagaattacctcaccaaagcaccactgcgagaaaacctatctggtgacgctggagcatccggtggctgaagataccgccgagcagtttgccgtgggcgtacaattgcataacgaggctaccttgaccaaaccggcgcagctggaagtgatagagccgcaattggttcgtttaacgatcagtgaagggcgttaccatcaggtaaaacgcatgtttggtgcggtaggtaatcgcgtagccgcgttacaccgcgaacgtattggtgccattgtgatggatgaagatctggcacccggcgaataccgcccgttgactgaagaagaaattgccagcgttggcgctccgcatctgagttaacagcgccatcgtttatcaaagcgattatgtgtgaacctaagagggaatcccttgattttagggattcccaacgtctcgggcgttgccaaaacgaaccatttcccccgccatcgtggtacgactgctctgttcgatctgaataatttatttggaacgaacggctgttgaaggagttgcaaagcgtgcaagaaaaacgaacatctcatattggtttgatcttaattctgggtttgctttccatgctgatgccgttggccatcgatatgtacttgcccagtatgccgattatcgccagagagtttggcgtggaggatggtcgcgtacaaatgacgctgagcgcttatgtgctcgggtttgctattggtcaaatgttctatggcccgatggcagacagtattggccgtaagccggttatcctgtggggaacggtaatttttgctctggcaggcgtagcctgcgccatggcgcaatcggtagagcaactggtcaatatgcgcttcctgcacggtttatccgccgctgcggccagcgtcgtgatcaacgcattgatgcgagatatgttcacgaaagatgaattctctagaatgatgtcatttgtggtgttggtgatgaccatcgcgccgctattggcaccaattattggtggcgctttgctggtgtggtttagctggcacgccattttctggagtatggccggcgcagcgctggttggtgcggtgctggtagcgttctttattaaagaaacgctaccgcgagaacggcgacaaaagttccaccttcgcaccacaattggcaactttggttcactgttccgtcataaacgcgtactgagctatatgctggccagcggattttccttcgccggtatgttctctttcctcagcgccgggccttttgtttacattgatcttaacggagtgtccccgcagaacttcggttattactttgcgctgaatattgtctttctattcctgatgacgttgatcaatagccgaaatgtgcggcgcgtcggagccattaagatgttccgtttcggcctgtttgtgcagttggttatgggcatcggtttagtggccgtgtcagctttgggactgggattctgggcgctggtgttgtgcgtggcagcctacgtgggctgtatcgcaatgattacatccaacgccatggcggtcattctggatgatttcccgcacatggcagggacggcttcatctctggctggcaccttgcgttttggtatcggcgcgttggtcggaaccattttgtcattggctccttcccgcagtgcctggccaatggttagctcaatggctttctgtatcattgcggcagtattcttctatctgtacgccagtcgtccgggcaaaaaggcggcctgatttggtttatcacgctgccggttgtttcgccggcagcgtgataaaccactttacctcaatgatttttccccgctcggctttcccttttttgttcttctgcaccaaatatttattttactgataactttatatattcaatcaccttctgaaatgacccaatcagaaataaggtgatattagtaagcgcgcttattatcatgttgattacttgttaatgttggcttgaaataagttaaaataaggaaaataacatttcgaagaatatgcggttttcgcgattattttccatgcattaaatcctcacttaataatatatttatcaatgagatgtcggtgttttcttcctggttttcggcggggaggtgttccttatttgtaaaatattaacgaaaagtaggtaaccgacttgcaagaaaaatggttgagaagacatgcggaaaggtatacatataacgaaaaaatgagatctaaatctcaaactcgctttttgggttagtgtagggaagcgggaaagacgtcagaaatggccaaataaataaccttgttagtgataggtttatgtattgttataaatttacactttgatgaggttctaatcaggcataatggcgctttagcggctataacttagttagcatgtgactttgttgtgcttttgtaatagttattgttaattttttactaggaaagacgcgtgaataatattcaactttcggtggttcatcgcctgccgcaaagttaccgctggctgtcaggctttaccggtgtcaaggttgaaccgattccgctagcgacgatagatgaaaagaacaacctgatggggttgaaattactgagtcatgacggtagcgccgccaggcaggtaatgcagcgcctgcacctttcgttgcaagaaattcaggttgattctgctattgtcgaatgggaaggggagccttgcctgtttgtacactgtcatgatgaaagcgccgctatgtgccgcttgaaaaatgtcggtgttgccatcgcagaaaaaatgacagctctctatcctttctaatcctccgcggcagaactgtctctgagaaatttttgcatgctcaaggttcctgcggcttttaatcggctagttgcaataactgtcgggtataaggctgcgccggtgcggtgagtacccgttggcaatccccttgttctatcacttctccctgtttcagtacgatcagctggtggcacagtgatttcactacctgcaaatcgtggctgataaacagatagcttaattgataccgttgctgaagcgatttgagtagcgccagaatctgtgcctgcaccgatttatccagcgatgaggttggttcatcgagaatcaatagctgaggctgcaatatcagcgctctggcaatggcaatgcgttgacgttgcccgccggaaaactcagtgggatagcggtggcgagtggtcgggtctaatcccacttcttccatggcggcaatcacacgctgttcccgctcggcggcgctgagcttctgatgaacctccagcccttcagcgataatttgccagaccgccagacggggattgagcgccgagtaaggatcctgaaataccacctgaatacggctgcggaaaggcagcatctgcttgttattaaagctatgtagtggttgaccgtcgaaacagatctccccgctggacggtaataaacgcagcaatgccagcccagtggtgctttttcccgatcctgactcgccgaccaaaccgagactttcccccggacgtaaatcaaagctgatacctttcaccgcgtagtgatggccaaccgttcgacgcagtaacccttttttgataggaaaacctacctgaagatttttgacgcgcagcaggggcgctgccatcggcggtagcggtattggctcgccttgaggctcggcgtcgagcaattgccgtgtgtatgggtgctgagggtgactaaacagcgtctggcggtcactcagctccactctgcgcccttcgcgcatcaccgccacgttatcggccagacggcgcacgatattcaggttatgagtgataaacagcaaactcattcccatttcttgctttaactctttcagcaaacttaaaatctgcgcctgtaccgacacgtcgagggcggtagtgggttcatcagcaatcaacagcttaggctgggtgagtaccgccatagcgatcatcactcgttgctgttcgcccccggaaagttgatgagggaaatctccgagccgccctttggcatggcgaataccgacgcgatccagacagctgataatctctgcacgcgcgctttcccgccccattccgcggtggagggacaacacttccgccagctgtttttcgatagtatgcagcggattcagcgagaccatgggttcctgaaaaatcatagcgatctggttaccgcgaattttgcgcagcgtattttcatcggcatggagcagcgattgaccggaaaatagaatgtctccgctcggataaaccaccggcggtgaaggtagtaaacgaagtaccgacagggcggtgacgctcttgcccgatccggattcgccgaccagtgccagagtttcaccggcttctacctgcagggaaagctggctgacaacctgacgttcctgttggttctggcggaaagcaatactgagatcctgaatatccagcagaggagtcgccatatcaatacgccttacttgggtcgaaagcgtcacgcaccgcttcgccgatgaaaattaatagggaaagcagcatcgccaacgcgataaatgcggttaatcctaaccaaggggcttgcagattgtttttcccttccaacaagagccctcccaacgatggtgagccgatcggcaggccaaatccgagaaaatccagtgaggttagcgtggtaatagacccacaaagaataaacggcaggaatgtcagagttgctaccatcgcatttggtagcatatggcgcgacataatcacccgatcgcgcacgcccatcgcgcgggctgcccgaatataatcgtagttgcgggcacgtaaaaactcggcgcgcaccacgccaaccagcgccatccagccgaataaaacggtaatcgccagcagccaccagaaattgggttgaataatgctggacagcaaaatcactaaaaataacgttggcatacctgaccaaacttcaataaatcgttgcccccataaatcgatttttccaccgtaatagccctgcaccgccccgacgcaaatgcctatcacgctggaaaatagcgtcagggttatgccaaacagcatggaaatacgaaagccatagataaccttagccaatacgtcaccgccgttgctgtccgtgcctaataaattgtggcgatcgggcggagaagggaagggaacctgcgtggagaagtttatggtgttattaccaaagcgaatcggcgcccatattgcccagccgtggtcttcgatacggcctattacgtaagggtcttgatagtcggcggcggtagttagaataccgccaaaggcggtttcatcgtagttcaccataaagggcatatagagtttgccctgatagctgaccagcaggggcttatcgttagcaataagttctgcgaataaactgatgataaacagcgtcaaaaaaatccacagtgaccaataaccgcgtcggttgtgtttgaaacgcgcccaacgggcacgattgatggcgctgagtggtttcattggcggccctcgaaatcaatgcgtgggtcaaccagcgtgtacgtaatgtcactgataatattcagtaataagccaattagcgtgaaaatatacagagtgccaaacatgaccggataatctcgttgtagcgtggcgtcgtagcccaataggcccagaccattcagagaaaacatcacttctatcaatagtgaaccggtgaagaacatactgataaaggtggcggggaaaccggcgataactaataacatcgcattgcggaacacgtgacgatacagaattttatcttcgctcaaacctttggcgcgagcggttaccacgtactgctttcgaatttcatccagaaaggaattcttggtcaacatggtcagagtcgcaaagccgccgatcacggtagccagcaccggcagtgtgatatgccacagataatcagtaatcttcccgtaccaaggtagggtatcaaaattactggataccaggccgcgcagcgggaaccaatcgaaataactaccgccggcaaataccacgatcagcaaaatagcgaacaggaaggagggaatggcataaccgataataattagcgtgctgctccaagtatcgaaggccgatccgctgcgcaccgcttttttaattcccaacggaatggataccaggtaaataatcagggtgctccataaccccagggttatcgacacgggcaggctgctttttatcaaccccatcacggtttcgccgcgaaacaggctgtcgccaaaatcaaagcgggcatagcgccagagcatatcgaaataacgttcatgcagaggcttatcgaaaccgaagcgctgtttaatttccgctatgacttctgggtcgagtccgcgtgagccgcgatattgtccttcccctaatggcccggcgttcacgccgactttcgcgccgcccagattcccgtctgaagcactgttcaaaccgctgtgctggccaaattcgatattagctatggcctgatccaccggcccgccgggagcgatttgcacaataaagaaattgatagtgatgatcgcccacagcgttgggataaccaataataaacgacgtaataaataagcgcccatatgttgctccttagcgccgttcagccggcaaatgagccgctttatttacgtcgaaccaccagctatcaaagcccagagaataggttgggcgcaccgcaggcatagagaatttatcccaataagcaaaacgggtgtgattggaataccacataggaatcataaagttattccatgtcagcactcgatccagcgcgcgaccaagggagagtagggcctccggttgcccctgatggctaataatttgctgaatcagagaatcaatagccggatcgctgacgcccggacggttatacgtagaatcaatatattctgagctccaatatagccgcagataagtgcttgggtaagtgaaggcgggataaaccgccgggagcatatcgaaatcgcggctgcgcaggcggctaaggtactgtgaactatctacctcgcgaatattcatggtgatgcccaaacgttgcaggttatgtttgaacggcagcacgtattggaaattgctgccgctgagtaacagcatttcgaagacaaaaggttgccccgttttgctattaatcaaccgctggtttttcacttcccagccggcttgctgcaagagttcgcgcgctttcagcaggttatcccgatcgttgccactaccgtcgctggaaggtggttgatagattttgctgaaaacttcgtcgggtatcttgccttttagcggtgctagccaggctaattccgcgctatcgggataaccggtagccgcatagtcggtattttggaaaaaactgttggtgcgttggtaactgttgaaatagaaagctttattcatccagtcgaaatcaaaggctagggtgagcgcctgacgtacgcgccgatcgctaaatagcggacgttggatattaaaagccatccaacgggtattttgtgccgatttatcctctaaatcctgcttaatgatgtagtttttggcgaaattgctaccaacatactgcgatgcccagcttttgggcgacgtttcttcccgcaggtcaaaggcaccggatttaaaggcttccagtgcgactttatcgtctaaataataatcgtaacggatggagtcaaaattatacattccgcgattgacgggcaaattggccgcccaatagtcgcgcactcgttgataggtaatatattggccaatgcggtaatcgccaatgcggtaagggccgctgcctagcggcggcttgcttaacggctctcccagtttacggttctgccagtcgtgcgcgggtaaaaccggcagccccaacatactcagcaacttatctttacccggctctgggaactcaatgcgcaccgtcaggcgggaaatggctttaaccttcacgtctttataagcgatgcgaaattgaggaacgccttcggtcattaacttattaaaggtaaattcgacgtcgttggcggtaataggaacattgtcgtggaagcgagcgtgagggttgatatcaatttcgacccagcgcatatccgcagggtagcgagcagattcggcaatcagcggataatagctgccgatttcatcgtcagagctggtaaacaggctatcgtacaggcgttcaaagccaaccgcaggcacgccgcgtagggcaaagcggttaaagttatcaaaggtgccaatggcggacagcgtaatattgccgcctttgggtgccgccggattaacataatcaaaatgagtgaaatcagcggaatattttggctcgcccaaaattgagaatgccacgccttcgtttagcgtttctgcatgcaatcctagactgaaagtagcaaatattagtgcggtgaatgcccgtaatagcatgataacggtgaacccctgcgacaaacctacatagcaactgtttcaagtaaaactaccagctgtccgggtacgaaggcaaacattaaagaaatttgttttcattacaaaacttcagcaatttctccagcgttaacggcctgctgagtaaataaccttgcaggaagtgaacgccgtgagcaatcagatattgtgcctgttgctcggtctcaattccttcggccacggtttcaattttcaaattcttcgccagtatcaatacggagtctaaaacgggcgcggtaagggtttcaaatccgatattattgataaatgcccgatcgatcttaatatagtctagcgtgaagcgttccagataaattagcgcgctgtgtccggtaccaaaatcatctacggcaattttcacgccgtgctcacgcagccaggcgaattgggaaatagcttgttcttcttctaccatcccacgttcggttatttcaaatatagggtcgaaggtatctaagggtaaccgcgctaacaaacttaaaacatcctcacggaatgtcggctcacctaaatgaagtggtgaaatattaaacgccagtttggtgccggtgggaatggaaccaaccattctggccgcatccgcaataattaaatcaaacaaatgctgggttagttgttgtatcaaaccctgagtttcgacaacgggaataaacaaatccggcggaatacgaccctcagtcgggtgctcccaacgcaccagcgcttccagcccggacattttacggctggttgcttcgaataccggttgatattcgataaagaattcaccgcgcttcataccgcgcagaatctcggcctcggggttttggcggttggacataatgtaataggcagaaattccgacaaaggcggccaataataatccgccaagtaaaattatccgaatatcactggctgtgaaattgacgctatacaatagtaacttgatgggataacccggaatctggatctcgcgagaggctgtgtcgggcagttgttcaattggaatgactttggcattaaaggttgtcacggcctggttgccaataataatcgccataccgttgacgcccttatcattaaagttaagcaataaataaggacgcaggtttaactctaaagttgtcaatacgccggtatttccgcggccaggctgacgtagccaaacggcgaccgccggtttatctggcagaataggcgtaccctgctgaagcttgaaatccagagtctggtataaattaagttttgggtaaatagcgttactgctgacatgcatttcgccggtagccgacgagcaataagtgaaaccatttcgtaccagtaagaatgtccgcacgccgttcgtaaacgctgccttatattgcagtgcaggctccgctaacttgcaggatttctccgttaatggaatcagctgagacatggtggtggttaagtcatttaagaaatgcgaggagtaagcgactatttgctcgctctgggcagataatcttttctcactgttacgataaagaaaagacagagtaacggtaacaaaacaaataaagaatatcagagaaatagtggcactttttttaatcaggcggcgcggggatacaatattgcgaaagaacgcattttttgaacccatgataacgcgactccctgacccgatgaaaaaagtaattataagtataaatatcttagcggtgaagcgctactggtttggtattagcctcgatgcttcagagctgatattagactaataaataaaatttaatattttaaactgacttaatggcaaaaatgtattaaatagacttaataatgtctaactttaattattaatatgatttttacctaagctaagttggaacaatatgctgcggttggtttaatcaacatcaaacaaggaaacagagtaagccttagctgtttctcgtcggcgattctacaagagaatgagggattgtgaaccccattgagcagaaaaaggacgtttcctacagcataagggaactaatctgaaggcgttgcaggttcaacagcaaaaaacgctgcgacaagggcagcgttttatcacttcgtttggcatttctgagcaagcagggaactgtctcaattagctttgcgtgcggttactcagtacgcggcggccatcttgataacgcttattccagtaagtatcggtcaggttcgaaattgtcacaccgacactggtcgaagcgtggacaaatttatcgttacccagataaatacctacatggcgtcctgtcgaacctgcgcggaacagcacaagatcaccggggcgcagttttgtacgctggatttttttaccaatatcctgctgctctgaggttgagcgcggtaaatccatgccaaattgttcgcggaaagtcagttgtacaaaagcggaacaatcaataccgcgtttgctgctgccgcctaagcgatagcgaacccctttccaacctgcgtactgttctaaaatctttgacttgatgtcaacgttgcgaaccatcgcttcgaattcatcctgagaggcttgcagtaaaagaccgtttttatcattaactgcacgcatctcagtttgcgtattttgtagattcgaagcgttgttcgagctacacgcggataacatgaccgcggcagctactgcaggtattaaccgcagaatgtatctcataataggttgagacttgaccattgttattgttttcccttgctgtccttacgacggatatcgccactaaaaaatgccaaacgaagtgagactagggttcacacatcgatcagacaataacttaaacgaataaatgtgcagagacgcacaatttttattggattaagcgcaaaatgctgatattcgagcgcaaactttttcgaggttaccggattgacttataaaaggcgagtatttttgcacagattcttataagaaatcctgatgtaacataatgttatattttattccttactcgattagcaatcagatacatcaaaaaccagtttaacttattgttttaaaggtaaataactggcttatcattgctctcctcgtcatgacgaacttttgtacactaatatagctctctaaaaattatgcatgaatatgtaccaaaacaatttgggcaagggaaaagtaaatcatgaccagcaaggcatttaacttgtaaacaaaagcaggtctttttgggagtattcctaatttattgcctctggaggtatctgacgaatcttctatttgcgcattgcgtgcattgtttatcctgatatgggtaacctgatatagataaatagcgctgagtatccttggaaggatatgtgcgttctaatggctaattaggctgtcagtaaaagtgtaatgtgatttgtgtcacccttttagggtttaataaccacttaatcaacttcagtcataaccgtggttatctgcgcaggttgcagtttttctatcaccttgtttcagcgctcaacggtttaatatttggaatatgataacgaacatattggtttatctttaaggcgatcgatgcgattttcgtcgaaatagcggttctaaaatagaagaaatttttaattcgactcctttctaactttgttgttctttgcactgctctaccaaataaaaaatgtaccgttgagctggggaaatgtcttgcggtttgggtgtgactcgcagtgaatttgtcaccaacgctggtagccatggtggggaagatactttggtcaaggtgattaattttttcgaaaagaatcaatccattaattaaccaaccgagagccgtatgctgtcacataatcaaaccttaaaacgtcaagatgatctccataaattgctgaaggatcactactcgttatttattcaagggattagcgagacacggcacatttctcctcgtacagtgcgacggaatatccgctccctggtcataaagtatccgaacattaacaggttctatggtcgggttgctatagatgcatgtgtccctggaagattttcctcagagtcaaatcatccttattaggggaaatatagggaatagctgcgagtttacctatggggaagaaaccatctggtaaattggccgctataagtttgatgtgtcttttatttcaaacgagcactttgacttggtacacggagtttccgtgccccgtcttgataacgtaagaatgaagcagcagctaatgctttgttcagaaaaaagttatttgattgcagaagggattaagttcaataagttctcattccataaggttgccgatttgacgcagtttgacggcgtgataaccgatggcgctattccaaaaaagacgattgatatgtcgatcagcaaaaatacggaaatagatttaatcgagatctaacggggagcggcgactccccgtggcgtggaaatacgtatcagagccgtggacgctgtgcgctcggcagacgttgatttatccagtcaatgattcgatcgctggctggcgtgagtaatatccaactggcaccgaccaatacaacggaaagcgcgccgacggcaatatcagtaaaccaatgggcgccgatcattattcttggcagagagaacacgatggcgataatcaacgcaatggcaaaagccccgcgtgagaaatagcgcagcatgaagcaggcgaatatgattaacatcatgccatggtcgccggggaagctatcgctggaggcgtctttggttgggataccaataagctcgctaacgcggttgatattctcaaataccagcgtcgggcttgggcgtttaaccggtaataaatgtccgagctggttaagaaatacggccgtcagtaacatcacaaaacccattacgattaaacgacggcgtcctgccggattttcttttaagaaaaaatacatgtacagcgtgcccatgcacagcagagaaataacgtcgaaggcacggttattggttaccgccaccacatgtaggaaggttgggctggaaagcaggcgctcattgaagtaatggaaaatggcggaatcggggccgaaccaccaaccatgattttcaggtaagtaccaggataggaacagggctatacccaataggttgagcatcaagattgtcggtaaattgcggcgggtcatgcgaaggcctatatataattagatgtttaaaacagtaacgcagataaaaatacgtcgggcattatacctacttatgtaaacgaatattcaacaaattgccctgtagcttattccagtcgttgtctccggaagaaatcacttcaattcgactgtctggcggcggagtggggcgggtctcaatttgtaaatcatttccctgccgattaaccaccaacgcgccttcgggaatacgcatcacgcctttaacacgttctaccggactcaaacgaacccattcaagcaacggcacggtgtcaaatatcgcctcgctgttaaatacccaaccgcagctagtataaccttgcccctggttaagcgctctgcgccagggttcgctaccgttcaggtttaatgcagccaggcctttttttggggatgattctccgtgatgatggcgtgcatccggcagttgggtcttattggtatgcagaatatccaatacggaaatagctatttttcccgaatcagagaaatatagcggacgctgcgaattctgagcttgctgccattttgccaatgcctgacggtcggtatcgatataagtatcttgcttactggcaataatgacatccgctgcggctagctggtcgcggaaattctcgttttcagtgtagcgttcatcatgtaattggcgggcatccagcaggcacagcgtggcgctaagactaatccagggctgataaatatcggcggttaacagagacaaaatttgctttggatgacccaaaccggtgggttcgattaataaccgatccggtttggcctgctgtagcagcatattcaatcccacttgcataggtaaaccattcacgcagcacatacagccgccggggatttcttttagtatcgcgccactatcggataataacgcgccatcgatgccaatttctccaaactcattaactagcaccgcccatttttcatgttcgggtttttgcgccaataactggcgaatcagggtggttttaccgctgccaagaaaaccggtaatcagattggtttttgtcaccacatgctcccagtaaaaaaacgttgcgttaagcataccgaaaaataaaggcagcggaactgtcacatcatgcgcttaaaaatataatttattaagtagcttaataatcaatcagttattaagacaactcttaatgcagagcctgaataggctaacgactgacgttgataatttaactattttaatgggttatgcgccgattaaggtagtaaataatgccttatcaacaccattgttttgagcgaaatcctctactctttaattgagtcttagcggattttgaggtgaacatgggtcaatatcgagtactcagcgtcgcactggttttattttcatggaccgcattggcttatggcacagccaccagcggtatcgttcgctttactggctccattgtagatgcaccctgccagattgatttttctgcacaaactctggcaacccgatgttatagcaacggaaaaaacctttctcaacgtcaagttatcacgacgggcatgaacacaacttccaacttaccggggaatctgggcacttcagaagttcaatggctgaataaagaacgcaatctggctattgtcaccattaattatcgctgaaagaatagctattgctaaaagaacagtcgtagctaaaagaataattatctctgacaaaccaacgcttatccattcaacgctagcagcccgatttaattaaatcgggctaatctgtagcataattctttgcctttctgtgagcctctgcgcagctctgccgatttttctgtcggaccagatgttatacttccagtcacatatagggatattatcggttaaacccacctttttggtcaggccaattcagcttggtactgttaaacaggctagattcaggtaataaaataatgcgtttataccaagaagtcggcgggaaactgcgcgatgcactgaatgcgggtgaatatatcgcaggcgatcgcctaccgccagagcgagatattgcagaaacatttcaggtcagccgcagtgtggtgcgggaagcgctcattatgcttgagctggaacaacgggtggaagtccggaaaggctcgggcgtgtatgtgcttagcaaaccagaaaaaaatgctgatgatgagcagcccgaaattattgatagtgggtatggaccgtttgaattgctacaggccaggcaactgctggaaagtgaagttgccgcttttgctgcattgcaggccaccaaggccgatattctcaaaatgcggcaggcgatagagcaggaaaggctgtcgctagaagccggacaaatagatgaaagtgccgatgagctttttcataatcttctggcgcaatcgacacaaaatagcgtattggccagtatggtgcgggaagcttggcaggcgagggataccagcgtgatgtggcagggcgttcacctgcacgttgccgatttcagctaccgttggcaatggctggaggatcatcaaaagatcttgcaagcggtgttacggcgggacagcaaggcggccaaacaggctatgtggcagcatttggaaaacgtgaagaatattttgttagaaatttccgattccgatcatcctgattttgacggttttttgtttgaatcggtgccaacattatcagataacggataaataacgggcagggataagttggggatagatggtgtgaataaaattaatagcgcggctaaacaatagcggctaaacaataaatgggaatgctttgcgacaatgccactgatcgccttagacggccagtggcattggattgatcaggctttctctaacaggacgcgcaccgtttctttggcgccattttgttgtaactgaacataagcctgagtgacggcagcgacaaattcagcccgctgcggcagctcttcgccgaagatgctttttagtgccagcaaagcctgcactcgttctgcgccgtctctggtttccgcgacgcaggctttaaaactttccagcattggatcgcgaatatcaatttcctgacctgcatcgtcaataccgccgacataacgcatccagcctgcaatgcccagcgccagacaggcgtaaggtccgccgtttttcagatgccaacgcacggaatccagcattcgctgcggcagtttttggctgccgtccatcgcgatttgccaggtgcggtgtttcagcgaaggattgcggtaacgttcgataaggctatctgcatatgcacctagatcggtattttcgacgctaagcgttggtgcctgttctgccatcatcaactgacgagcggcacgcacatagttggcatcggtcatacaatcgctaatatgttgataacccgccagataacctaagtaagccaagaaagaatggctgccgttcagcatgcgcaatttcatttcttcaaagggcagtacatcagccactaactgagcgccgacggcctgccagtttgggtgtccggcaacaaatttatcttcgataacccattgaataaatggctcgcaggctatgccgcagggatcggctacgcccagttcggcggcgatttcatgcagcgtttcattggttgcggccggtacgatgcgatccaccatggtattggggaaagtgacgttctggcggatccattcggccagttccggatcgcgaacggcggcgaggctcagtaccgtactgcgagccacatcgccattttctggaatgttatcgcaagaaagtacggtgaaaggcggcaaaccgcgtaaacgacgcaggcgcagcgcttcaaccagcacgccgggtgcagaggttggcgcttccggtacggccagatcggcctgaaccatcggatgattgagatctaactgaccgctgccgggttcaatgcagtagcctttttcagtgatagtcagggagacaatggcgacctggggttcagccaatttatccaacaccgccatgataccgtctaaacgggcatgcagagattcgcgtactgcgccaaccactatggcctgattgccttcggcacctttttccagcacggaatacagatggtcttgcttacgtaagtcctgaatcagggtatccccgccgaacagactgacttcacaaatcccccagtcaccgcccagctgattcagcacccgatcggtcaataacgcctgatgagcgcgatggaaggcaccgaaacccaggtgaacgatacggcttttcaactggctacgatcgtaagtcggaaggcggacggcgccgggaagcgggctattggcaagggtcttcatacataagctccagaatggtttaccttcccaaatgttcgcctgagcgtctgggaaccggtatcaaatataggcaagctggaaaggtgttggaccagtttggtaagtctgcttctctgggctaaccctctctatcagggagaggtttttccgctgcttgtcatgattagcggcttgcagtgtaaagcgatatgatagaaattaaaattggttagtccaaaattggtcatattcgtgaggtggatcaaccaatatacttttgctttttgacactttttcactaaagagtaaggttaaagctgagtgatatctattgataatcggtataacaacatttcggtaaaaggttagatacgtgaaattatgaccgcttggataccggattgagctttagatgatgaataaccgtgaaaaagaagacagtttgactcccgcatcgcagttattgccgatggtgcagtaacacggggtaattcaatgatgacaatgacgcaggtgagaaggtaaagcagatggaacaaacatggcgttggtatggcccgaatgacccagtttcgctggatgacatccgtcaggctggggcaacaggcgtagtaactgcactgcaccatattccaaacggcgaagtgtggccggtggaagaaattaaacaacgtcaggcagaactggcggcgaaaagtctggtgtggtcggtagtagaaagtgtgccggtacatgaagagatcaaaactcattcaggtgaagtcgataggcacattgccaactaccagcagacgctgcggaatctggctgcctgcggtatcgataccgtgtgttacaacttcatgccggtgctggactggactcgtaccgatctggaatacacgctgccagacggttctaaagcgctgcgttttgaccagattgcctttgtaaccttcgaactacacattctgaaacgtccgggcgcggctaaagactatacggcggaagaacaggcgcaggcagcggattatttcgattcgatgaccgaggcggaaattgcccggctgaccggcaatattattgcgggtctaccgggagccgaagaaggctatactctggaccagttccgcgctcgtctggctgaatacgacggcatcgacaaagccaaattgcgtgagaatatggcctatttcctgcgtgcaattgtgccggtggcggagcaggtaggtttacgtatggcggtgcatccggacgatcctccgcgtccgattcttggcctgccgcgcattgtttccaccattgaagatatgcagtggctgaaagagaccgtagacagtattcacaacggttttaccatgtgcaccggttcctacggcgtgcgggcggataacgatctggtcaagatgatcgaaacctttggcgatcgcattcatttcacgcatttgcgttcaacctgtcgtgaaggtaatccgaaaaccttccacgaaggcggacatttgcagggcgacgtagatatgtatgaagtcgtgaaggcgattctgacggaagaacagcgccgtcagcgagcaggggatcggcgtcctattccgatgcgtccggatcacggccaccaaatgctggatgatttgcacaagaaaaccaatccgggctactcggcaattgggcgtttgaaaggtttggctgaagtgcgcggcttagagttagcgctgaagcgagcgtttttccctgaattgcgttaattcagtgaaatgatggttagtggaataatgatggttaagggccggttttaccggctcttaacgttgaatcagcaaagattaatctgcgcgccccatataacggcgttctgcgatatgaatgcggattttctcacccgggctgatgtactcgggcacctgaattgacaggccggtactcatgattgccggtttgttacgagcactggctgaagcgcccttgatgctcggcgcggtttccacaatttccatatcgaccgtctgcggcaattcgagcgccagcaactggccttccatcgtcaatacttgcattcccggcataccaccttcaggaataaacagcagttcttcttcgatctgctcttttttgaagttgtacggcgtatagtcttcttcatccataaagacatattcgtcgccgtcaatataagagaagttgaccgcgcggcgggttagagtgatggtgtcgagaatatcatcgcccttaaaacgctcttccactttcaaaccggtacgcacgtctgaaaaacgcattttgtataaagtactcgcaccacgggcgcttgggctttgtacatcaatatctttcaccaacagcaatttgccgttgtagttgactgccataccgcgcttaatttcgttagctcttgccataaaaataacctgccaatcaggattgaagataagttgcgacaaattacccgtgctgcgggctacaggcaagcagatagcgtaaaaagaatgaggaaaaagcgcgaaaacctggcttggaacaagcaatgattcgatggcggattattgcgggaaaaagaatgtgccgccggagaggaattggcccggcggcgcagaagattggaacctattgatagaccggcagtaagcccattaatgcacagatatgagccacggcgttaatcaggccaaaggcgatgataaagccgatcatcaggctgccgcccggtgctcggtaagtggcctgcgggaagcggcggcgagttgcgcgcgccatcagtgccggaacaataacggcccaaatagtggcggccagaccggcaaaaccaatggcgtacaggaaaccattcggaaacagtaaggcaccgatggtgggtggcacaaaggtcactaacgctgattttgcccggccaatgccgtcatcggcgaatttaaagaaatcggcgatatagtcgaacagtcccagtgataccccgaggaaggaactggccagcgccatataggagaaggcattcagcaattgaccggtcaatgggcctgcggaaaccgtatccatctgttttaacaggctgccaatgttgccgccgtcggcaatcaccagtttgaaagcatcgcgcgcgatgttgccctgaatcacatactgccacaggatataaatcgccagagcaatcagcgtgccgaataacagactgcgcaccacggatttactgtctttgcgataatacttcaccaaaccgggcacgttgccgtgatagccaaatgaggtcagcagataaggcagagccgcgagcgcgtagggcagatagctggcgtcgctttggctatggttaaacagtacgtcggcttttacatgggtatacatatcaccaacggacataacgaatgtgattaccatcccgccaatcaatatggtactcaaacggtctaccgcgcgagtagataaccaaacgataaaggccaccagcaccgcgaagactaagcctgacgtggtttgccccacgccgataatgccgtccagagtgtgggcgataatggagccacccgccgagatataggcgtaagtcaggatatacagcacaaaggtaatggacaggccgttgattgagctccacatgcgccccagcaagtcctgcaccaccgtatggaaactggcgccagtcgggtagttgaggttagcttccaggatcatcaggccggaaatcagcatacatgcccaagtgtagatcagcagcgcgacagaaccgctaaaccaaacgccggcggtcacgataggaatagagaacattcctgcgccgacggcggtacctgctacgatcatcgcgccgccgagaaccgacggacgggatagggactgagtagagtccattgacatgcattgctcctgaaagacccgctgagggtaaggttcttttgtactagctcaatggtacagtggtggcggggcgctgtaaatagctgaatatacttagactgaataattagccggttaatacttcggccatcagcgtcattaatatcgctatatgatgcttatagtttagactttggttaaataatcgacaggtcgattgagtgattcatctcagttattgaggcggaatcatccgggggaaggatagtgctggtagttattgacggcgattgctattgtccgccatctactctgccagcccaccggagaatcactgatggactgtcgctcagattgcggtgcttgttgtattgccccctcgatttccagccccattccgggtatgcctttcggcaaatctgccaatacccgttgtattcatttagccattgatatgcgttgcgccattttccactctccgcagcggcctaaagtgtgtgccagcctgcaggctcgacgggatatgtgttttacccaccgcgatgaggctttggtgtatctgattcagttggaagccgccaccgcgccataatgggcaatagcgcctggttttgggcataaaaaaggcgatattgaatatcgcctttcatgttttatctgcggagccagaggtacatcctctggcttcatgttgtcaccattaagcgccttctggcaccgcatgtgcggtattttttagcacctgaccggtatatttctcaatttccaactgcgccatctggccacagttaccctgagccagactggatgagccgatatcgaaagtcaggcagttgatattgccgtttttacagatagagcccggttccgccggttctgccggatcgaaccacgctccctcactgacgcgaatcacgcccggacgaacgtcttcggtcaccactgcgcccaccaggatctgaccgcgatcgttaaaggcacgaaccagatcgccgttggtaataccgcgtgcgctagcatcctgcgggttgatcagaatagcttcacgatcggctaccgcatattttttccgcagcggggtgttatccaactgggagtgcaaccggttgatcggatgagcggtattgagcgacaacgggtattttttcgcttccggcccgcgataccactcgtatggcggcatccaggtaggaattccccgacaatcggcataacccattttggcaatggtatctgaataaatctcgatcttgccggatggcgtccccagcgggtttaacagtggattttcccgataatcggcaaaacgaatccattgtttattggcctctggaatcgggaagcgaacgtagttattcgactgccagaacatatcaaacggcggcagagcgactcgcgccgttctggcctgagatttcatatcgtcgtacatggatttgagccactgggtttcgtctttgccgtcggtaaaggcatcgagaacgcccagtctggcggccatggcagcgaagatatcaaaatcgttacgagattcatgctgcggcggtacgcattgatgcatcgggaaaacatacagttgcgagtaatcgccgcccatttccagatcgttacgttcgtagctggtggtggcaggtagcacgatgtcggcgtacttggcggttgcggtccagtaaggttcgttcaccacgatggtttccggatgctgccaggctttgatcagcttattggtatcctgatgctggtggaaggtgttaccgccagccacgtagaccattttcacatcgggataagttaccttggtgccattaaaatcaatggttttacctggattagccagacattccgcaatacgcgccaccggaattggagccggtgagttcttcggcgcattaccggcggaaatccccggtaaaatgccgcctttggccgttgggctaccgccggaagagtagtgatagctgaaaccgaacccgccgcccggcaggccgatttggccgagcattgccgccacggtcaccagcaaccagtgctgttgttctccgtgatgctgacgctgaatgccccagccgcccatgatcatggtgcgctgtttggccatatcccgcgctagctgacgcagaacttcagcatctacgccactgatatcagcggcccattcggcatttttcggttgaccgtcattttcacctaacaggtaggactggaatttatcaaagccgacggtgtaggtcttaacgaagtccgggtcatacaatttttcagtcaataaggtatgggcgataccgatcagcatcgcgctatcggtataagggcgcggagcgatccattgagcgttagtgaatttggcgctgtcgttatacaccggatcgatgctgataactttggtgccttttttcttcagcgcttcaaaaccggtctggcccacgtgatccggaatgttccagctattttttagcgtgatcatcgggttacaaccccacaggatcactagctcgctgttttctaccacgtttggccaggcggtttgctgctcgtaaacctccatagagccgacgacgtgggacataatcacttgcgcggcgccggtagaatagtcaccggcatagccgaggaaaccgccggtcaggttcatcaggcgttgtaacagggtgcggctgttgtgcagcattcccacgcttttccagccgtaagaaccggcgtacagtgcctgcgggccgtgatctttctgtacgcgggtaatttcgccacacaccagttcaatcgctttatcccaactgacacgaacccactcatcgcggccacgtagctcagtacggctacccggcccgccttccagccagcttttacgcaccataggatatttgatgcggttttccgcgtgcacctgataaggtgccatggtgatcagatcgttagggtagggatcgtcttttaccggctgaacggcgaccatacggccattttcgacaatagcttcaaacgcaccccagtgagcgccggtcagaatgcctttctgtgcctggcgcaatgccaaaaattgaggcaacgcctggctaatagcctctgccagcgcagatttaggccacaggccggccactaaaggtaacgccgctaacgcgctggtgcccatcaggaaacggcggcggctcatttgtaacggtttttgttcgtatttgctcattttcgcctctcgtttacgacttggccggcatatcactggcatgtttttgtacgtattgtgtcagtacgcgtagctgttcctgagtcagggaagtacgcggtgccatgcctttaatcacgccaatccactggttagcattgaaacgatccagtgcagtcaaaccgtggcaaccggtgcagttggaagacatcatatcggcggcgtagcgccagattttttgttgatcgtcaaccagctgtttcttcggtaaccagacttgtagcgccacctgatgccagatcagaccggtttcagcatcggtttgtgaggacgtggttttcagcgctttctgcgcttcttcgcccagtaatacgctgaggatgcgtttaccctgagcagcgtagaagacttccgctacgccatcttgctgccagccttccacgtcgactagcacctgatcgccttgctgtttcacgaccttaacttcggtagatggcatcagattaccggcgttatggctgtcacccgcctgcataaagaaaggttcggtggcaatggtgtataacgtggttgcgtcagccggtgtttgtgctgcggcggtggctagctcggcagccccagcttgagtcagctcgctcatatccggcaggatgtgggccacgcctttgtggcaatcaatacaggtttccccgtttttgatggcgaccggatgctgaacgcgggcttcagcactttgcgcggtgatgtccatggcgtcataattatggcaggagcggcaggtggcggagtcgttctctttgagggttttccacaccgattgcgccatcgccagcttatgggcttcgtacttctctggcgtgctgatggtcccgaccatttcgccgtagatatctttcaccgcccggattttagtccacaggtaatccagtggctcatggggaacgtggcaatcagcacattcggcgcggatgcctttcgggttctggaagtggacgctgccctgatactcggccaaaggctgctgcatggtatggcaggaaacgcagaaggtagtatcactggttttatggaaaacggtggcagtaccagccagaagtgcagcgccaagaatgatgccgatcagtaatagccatagccatccccaccgacgtcgtttaccgagttcagtctgttttttgctcatattacacccatgttatgtgtctaattgttttggtaacgctagattggcgaacgttgggcaagacaaaatccgttgcccataaaaatagtgcgtctattgtaaatggattttttgctgaaaactaaccagatagaggtatttgcaagattagatcaaatttgctgagtataaatacaggaaacgcacaattttttaccaagcatagacaataaatacttgaaatgcttggttatataactttttatatagcgctattttttagttggaagaggtataaaaacggcgagttaaccagagatgaatggcatttttacttgcctcaaagtgtggttcgggcagttcattgggggggcaccaaatccattggctacatttctccggctctttattttccacctcgccgccgggatactcggccagtaaacataccgaaaccgtatgtttgccttcggcctgccaggtggcgatattattggtcagagcaataacctgtggctgctgaatcagcagaccggtttcttcagccacttcccgctgcgcgcactgttcaaaggattcaccagcctctacatgcccgccgggaatcgaccagtagggtgcatgcttaccgcagcgttttcccagtaataccgaaccttgagggttaactatgatgacgccaacgcccacaaccacagccatattttttctccatcagcaaatcgtcagcaaagtatgccatttctgccttaaaccctaccagtgaaagcgtctccagaggtaaaatgtgcgtgacatcaaaaatctgctatgacaattcgaagaaaacttgcataaacccaaatgtagaaacacactattgaaacgtttcagcgttatctgcttcactgggtgataaagggtaacgctcctttttctcataaaagctgaaacgattcaatttcagtaagagaggagacttatgttccagttgtcactgaaggatatccatttggctgccaacgcggccgataaaaacgaagccatcaagcaggtagccgcagcgctgaccgacgccggttgtgtcgatgccgcctatgttgatgggatgctacagcgcgagctgcaaacttctacttacttgggtaacggtatcgccattcctcacggcaccaccgatacccgcgatctggtgcgcaacacaggcgtgcaggtatttcagtttccgcagggtatcgcttggggcgaagatcaaaccgcttatatcgtcataggtatcgcggcgcgttccgatgagcatctggcgctgctacgccagctgactcacgtactgagtgacgatacggtagcggctcagttggcaaaaacgacctcaccagaggaattgtgcagcctgttgatgggtgagaaaaaagcggctgaattccatttcgatacttcattaatcgccctggacatagcggcagataacctgattacccttcaggcgctgaacgccggtcgtttacagcaaattggtgcggttgatgccagcttcgttagcgatgtgattactcgttcgccgctgaatctggggcaggggatctggctgagcgacagcagcgaaggcaatctggtcagtgcggcaaccctcagccgtccggcggtgccttttgagcataacggtgaaaaagtggcgctgttgctgacgctgtccgtagccgaccaacagccgctgaacatgctgaattatttaagtgatttactgttggcgaaaaaagctgacgccttgctgaacgccgatgccgccaccgtgctggcattgctgaccagcgaatatgtagaacagagtcaggtgttaagcgcggagtttgtcatccgcaacgaacatgggctgcatgcgcgcccagggacaatgttagtgaatacaatcaaacagtttaccagtgaaattaccgttaccaatctggacggcacaggtaaaccggcaaatggacgtagtctgatgaaagttgtggcattgggtgtgaaaaaagggaatcgtctgcgctttaccgccagcggtgaagatgcgcaggctgcgctggatgccattggcaccgcgatctcagccggtcttggggagggcgcagcatgagcagaagagtcgcgactatcaccctaaatccagcctacgacctggtcggtttttgcccagaaattgaacgtggcgaagtgaatctggtaaaaactgccggtctgcacgccgccggtaaaggcattaacgttgccaaggtactgaaagatttaggtatcgacgttaccgtgggcggtttcctcggtaaagacaatcaggatggattccagcatttattcagcaatttaggtatcgctaaccgttttcaggtagtgccggggcgtacccgtattaatgtaaaactgaccgaaaaagacggcgaagtgacagatttcaacttctccggtttcgacgttagcaagcaggattgggatcgttttgtggtggattccctgagctggctgggtcagttcgatatggttgccgtaagcggtagcctgccagcaggcgttaatcccgatgattttaccgattggatgtcgcgcctgcgcagccagtgtccgtgcattatttttgatagcagccgcgaagcgctggttgccggtttgaaagcgtcgccgtggttggtgaaacctaaccgccgcgagttggaaatctgggccggtcgtccgttgcccgctttatctgacgtcgtcgaggccgcacatgccttgcgcgatcagggaattgctcacgtggtgatttctctgggtgcggaaggggcgctgtgggtgaatgcttccggagcctggttggccaagccgcctgcctgtgaagtggttagcaccgtgggtgccggtgactctatggtgggcggtttgatctatggcctgctgatgcgcgaatccagtgaacatacgctgcgattggcaacggcagttgctgctttggccgtcagccagagcaacgttggcgttaccgatcgtccgcagttggccgcaatgatggctcgtgtggatctgaaaccttttaattgatattcggaggcgaaatgaaaacgctactgatactagacagcgcgcatggacaggccagcggccatctggcgacgttaatgctgggcgccgcggccagcaaagccggtcttacatgggttgataaagcggaagacgcggagctggtgattgttaccggttcggcaataccggccgacggcgcattaaacggcaaaaaagtgtatctcggcgacctggctaaagcggttcgcgatccggatgcttttctggcagatgccattgcaaaagcgcaaccttatcaggctagcgttgaagctcctgcggcagcatcagccaaagggccaaaacgtattgtggcggttactgcctgtccaaccggcgtggcgcacacctttatggctgctgaagctattgaaagtgaagctaaaaaacgcggctggtgggtgaaggtcgaaacccgtggctccgtaggcgctggcaatgcgattacgccggaggaagtggcggcggctgatttagtgattgtggcagccgatattgaagtggatctggataaatttgccggtaaaccgatgtatcgcacttctaccggtctggcgttgaagaaaaccgtgcaggaattggataaagctttggttgaggctgaagtgtatcagccgaaatctgccggtagcgccaataccggcgtgaaaaaatctgagggcggtggtgcttatcgccacctgttgaccggtgtttcttacatgctgccgatggtggttgccggtggtttgtgtatcgcgctgtccttcgtattcggtattaaagcctttgaagaaaaagggacgttggctgcggccctgatgcaaatcggtggtggctctgcctttgccctgatggtgccggtattggccggttttattgccttctccatcgctgaccgcccaggtttaacgccgggtctgataggcgggatgctggccgtcagcactggcgccggtttcctcggtgggattatcgccggtttcctcgccggttatgtggctaaagccatcagtaccaaactgcgtttaccgcaaagtatggaggcgcttaagccgatactgattatcccactggtggccagcctgatagttggtttagtgatgatttatgtggtcggtacgccggtggcaaaaatcatgagtggcctgactgcctggctgcaatccatggggacggccaatgcggtgctgctgggagccattctgggtgccatgatgtgtaccgatatgggggggccggtgaacaaagccgcttacgcctttggtgtagcactgctgagctcgtcagtttatgcaccaatggctgccatcatggcagcgggaatggtgccaccactggcaatgggtctggcaactctgctggcacgtcataagttcgacaaaggccagcaggaagggggcaaagcggcgctggtactgggtctgtgctttatctctgaaggtgcgattcccttcgccgctcgcgacccaatgcgtgtgttgccgtgctgtatcgctggtggcgcgctgaccggtgcactttctatggcattcggcgcacaactgatggcacctcacggtggtctgttcgtgctgctgatccctggggcgattcatccggtactgctgtatctggtggcgatcatcgccggtactgttttggccggtggcttgtacgcgatgctgaaacgccctgatgctgcattggtgaaagtggcttaatgcattattagcaacacttaaatagcattaaaataaattatcgataccagtcagttaaccctgactggtatttttttattggaaatatagagttttatatttcagacggttaatttgttactggcccatttattaactcgccgtatgtattgttagtcgaataataaatctgactttgttcagtgtttttgacgtttgatcagaagaatcgcagcccaattcgttatacctcatcacttatttcgtcaccttactacgttttgtttaataaggagggcgggatgaatggctctattgtgttaaacaagcgttagaatttgctgaccattaatgatgaataatacgtcttatcaataaataaggtgttattaccggaacacctgtatcaccgcgccgatgacgtgatttcccgcgatgatctgctcagtacttgccggctggatcgcgtggtttcgccggtattttttccgggtaccatcaaacatattcgcgatgtattgcgcaaaactacctaggctgaagtcattacccaggctgaagtaataaagacgcataaaaggggagagaaagtctatttgagtggattatcggatagcgggcagctgcaatggggtaagaatgccagccagcagtattgggggagcggctctcaacggcgaaaaaggcgctgccgagctgtatctactcagtggagcttgccactacagcaaaatgcccgtcggggttaaacccgcaggcatactttagataatggtgatgactagatttcttcctgtgatttcagccaggcgatttcttccggccagatatccgggttaacggtttccagaatcagcggaatattgtcaaaacgcggatcgcgcataatgtagctgaagacggttttcccgatgttaccttcgcccagactgtggtggcggtcgacccgactgttaaattcgcttttggcatcattcaaatgcattccacgtaaatattcgaaaccgacgatctcacccagcgcggcaaaagtattctgacagtcttcttctgtacgcaaatcatagccagcggcaaaggcgtggcaggtatcaatacatacgccgacgcggcttttatcttctacaccgtcgataatggcggccagatgttcaaatttgaacccgagattactgccctgaccagcggtgttctcgatgacggcagccacgccctgagttgcatccagcgcgatattgatcgattcggcaatgcgcgccagacagcggtcttcatcgatttgcattaaatggctaccggggtgaaagttcagcaaggtcagccccagttgctgacagcgcgtcagctcgtcgatgaaggcttcgcgagatttctccagcgcttccgtgaccgggtggccaaggttaatcaggtaactgtcgtgaggcaaaatatgggcgggactgtagttaaatttctcacaggctcgtttgaatttttcaatcacatcttcaggaagcggagctgcacgccattggcgctgatttttagtaaacagggcaaatgcggtagccccgatttcgttcgcccgaatgacggcttgatctacgccgcccgcagcgctgacatgtgcaccgacaaatttcattcaattctcctttaatcactcgctcattatgacattgataacgacttgattgaatggctgaaggcagattgcggataaaggaataaaaaaccctctgccgaagaccggcagagggtaggatgtgacttcaatggggaaatcagccaagccaatgttgaaccaacagattaatgccaccgccgccgataatcagccagacaaacagcatgagcgccagtaataaaggcttcattccagcctgacgaatcgagccgatatgcgtggtcaaccctagcgcggccatggccattgccagcaaaatagtgtccagcgtaatcaaatggctaacgacggtttctggcagtaaatgcagcgaattgaaaccggccatggcgatgaaaatcaccgcaaaccacggaatggtaatggcacttttttgattctgcgaaccggattctggctggcgactgcggctgagataggctgacagcacgagcaggaaaggagccagcatcataacgcgaatcattttggtgatgactgcggcattttccgcatccgagccgatagcatggccagccgcgacgacctgagccacttcatgaatagttgaaccggcaaaaatcccaaaggtttcctgaccgatcggtagccattggtagtgcagatttagctgataaaaccacggataaatgaaaatgcacaaagtaccgaagatcaccacggttgcgaccgccaccgccactttactggcatcggcttttagcaccggttcggttgccatcaccgccgcagcgccgcaaatactgctaccggcaccaatcagcatcacggtttgctgatccagcccgaaaactttacgacccagccagcaagccagcaggaaggtggagcttaacgtcatcagatcgataagcatgccggttgcacctacgtcagcgacttgctggaaggtcagacgaaagccatacaaaatgatacccagacgtaaaagttgttgttttgccaacagcacgcccggtgaacaagaaggttgtagccagggatacagggtattgcccactaaaataccgaacaatatggctaacgtgagcgcccctaatcccagattgataaaccacggcatatcgcccacgtgaatcgcggcggcggtcagtgctccggttagtaccaatccgggaacaaaacgcatcagtgccgcgggctgcggccgttgtagagtctgaatctggtgagttgccatcgttatctcctacatcctgtaaacacgccgagatagtacaggatgtcagaagattagataaattgattatatggttataacttatttgtataagtggtaaggcgcgcgtttttcaaccggaaaatagataagccgaagtggcctaccccagtttgagcgctttcgttgattaattatcctattgatagagtgtcaactgcggctcgggcgtgagtccccatgcctttggtcgaatgtttgtcggttcatactttttccgaatatataatcaaaaaaatggttacgacctactatcgccttactgtttatgcgtgaaaataaattcgctggtatactgagcattgtaattagaggtttaacgtttgaatgaaaaatactaaaaaatatgaaaaatcgctgctggcaattatgttgttcacggcagtgttatatcttttgatgcctcctgcgcttatcgcctattttttcggactctataatctgaatcctttttcaattggcaacctgccgcatttcaatccgtttaacaccgaacgtgggttgccgctgcaccaaatctactgttatctgctgctagcctggctgttgctgaatggtctgataattttggttatcaacttaattcatctggttttttttcgatctggtgatgatgaataaccactgcattagcatttatcagtattttattcggcaatacccggcgcttttctataaaggtgttacccttaatacgataattatcagcggtaatacggcactaactcgtagccacgcatctttataacattgtaaattatagggttgtgttaaaacgcggcgttcaaagccagcgtattgagggcagggctgccaatttcaattacagagactgttatgcatatcaccttgcgtcagcttgaagtatttactgaggtattgaaaagtggttctacgacccaggcttcggtggttttggcattgtcacaatctgctgttagcgctgcgttagctgatttagaaggtcaattaggcgtgcaattgttcgaccgggtggggaaacgcctggtgataaacgagcatgggcgcctgctctatcctaaggctgtagccttattagagcagaccagtgagatagaagaactcttccgacaggatgttgggtcactccgcatcgctgccagtagcaccattggcaattatatgctgcccgctatgttggcgcgctatcgtcatgattttcctgcaactccgttagaactgaatattggcaacagcctggatgtcattaccgccgtggctgatttccgtagcgatcttggactgatcgaagggccgtgccatatgcctgaattggtcacccaaacctggctcagtgacgagctggtggtgtttgcttctccagataatccattgtgccataagccgattacgttggatgaactggctgacgccgtatggattttgcgtgagcgaggttcgggaacgcgtgaggtgttggatcacttgctgctgacccatttgccacacttcactttactgatggaattgggcaattcggaagcgataaagcatgcggtgcgctatggcatgggcattagctgtctttcccgacgagtcatcgccgagcagctcgcgaacggcagtttggtggagatatcactgccgctaccgccgttggtgcggacgctatatctggttcatcatcggcaaaagcatctgtccaacgcgctgcaacgtttcctgagttactgtactgagacagagtaatcccgatttcgggttatggatattccagaggttcccccgtgattgtgttgatattttagacaaaaccgcctttttcattaggatttcactaataatctgatggcgatcatgaaggtatcttatatcagcgcattcagactacccacgctggcgggatttgttacaattccgcctcgtttttttcagggcagattaggtaagaatggctcagacagataataaaatccccgtgcagcatggcgcgcagagattacgccgcgagctgaaatcgcggcatttagccatgatcgctatcggtggctctattggtaccggcctgtttgtcgcctcgggcgctacggtttcgcaggcagggccaggcggagcattgctctcgtacgcactgatcggcttgatggtgtatttcctgatgaccagcctgggcgaattagctgcctttatgccggtttcaggctcattttccacctacggttccaaatatgtagaagaaggtttcggcttcgcgctgggctggaactattggtataactgggcggtcactatcgccgtggatctggttgcggcgcagttagtcatgaactattggttcccggaaactcccggatggatctggagcgcactgttcctggggctgatgttcctgctgaattacatttccgttaaaggttttggcgaagcggaatattggttctcactgattaaagtcactacggttatcgtgttcatcatcatcggcgtactgatgattgtgggcatcatgaaaggtggtgaaagtgcgggttggcacaactggacgattggcgatgcaccgtttgccggtggcttctctgcgatgattggcgtggcgatgattgtcggtttctctttccagggcaccgaattgatcggtattgctgccggtgaatcgaaagatccgggtaaaaatatcccgagagccattcgcaaagtgttctggcgtattctgctgttctatattctggcaattctgattatcagcctcattattccttataccgatccgaacctgttgcgcaacgatgtcaaagacatcagcgtcagtccgttcactctggtattccagaacgccggcctgctatccgctgcggcggtgatgaatgcggtcattctgacggcggtattgtctgcgggtaactcgggtatgtacgcttcgacccgtatgctgttcacgttggcctcggaaggtaaagcgccgcgtatcttcgccaaactgtccaaaggcggtgtgccgcgtaacgcgctgtatgccaccacggtggtcgctggtttgtgcttcctgagctcaatgttcggtaaccaaacggtttatctgtggttactgaatacttcaggtatgaccggctttatcgcttggttggggattgctatcagtcattaccgtttccgtcgcggttatatgaagcagggccgtgatcttaacgatttgccataccagtccgggtttttcccgctggggccaattttcgccttcgtgctgtgcctgattatcactctgggccagaactatcaggcgttcctgcaagatcgcatcgactggtacggcgtgaccgcaacctatatcggcattccactgttcctggttatctggtttggctacaagctgactcgtggaaccaaagtagtaaaatacgatgaaatggaattcccgaaatggaaagatgaacattaaggtttattgtttgcttcgctgaaagcgttcggcaatataaattaatgtgatagaagggcgattatttaatcgcccttttttaatgggaataattctcaccttattgtttttatgaaatcttgggcaaaaattttcgtgaagattggtcggatctgtttatttaagctgacggaaatgaaacgggtaggttaatttatttttataaaataggtatttacaaaagattacattcaataacctttagcaatcttattgataagtattatcgtttgttttattgttagcgccatcttataaagacgaccaaggatatctgcgtgaaatctgtatcacggaaaatggctaaaggtgtaagtatcagtcttttgatgggcagcacattaatggcgggttttagcgcctgggctgaaaatattactgatatggcagggcgttcggtagaaattccggccaaagtcgatcgcattttattaggtgaaggacgcttattctacgcagtctctctgctggaaggcaaaaagcccttcgaccgaattgtcggctggcagggtgacttccgtaaactggatacccaaacctacgccgtttataaagccaaattcccgcaggttgataatattccgttgataggcaataccactgccgacagtatcagcccggaaaaagtcctgacgctgaatcccgatatcgctatttttggtttatctggtcacggaccgggtaaaaacagcgaattggtcaaccagttagagaaagccggtgtgccggtggtgttcgttgatttccgcacttctccgctgaaaaataccctgccaagtatgcgtgtattggggaaagtgttgcaccgcgaacagcaagccaatgattacatcaaattctatgaagataatgtccgtaaagtgactgacattaccaacaccgttcccgccgagaaaaaaccaagcgtgttcatcgagctgcgtgctggcgcgatggaagagtgctgcggcactgccggtaaaggtaacatgggtgactttatcgatcaggccggcggtaataacatcgctaaaaacctgctgccgggagcactgggtacggtaaatctggagaaagtgctttcggctaatcctgatatctatattgctagtggtggtaaagcgccggacaataacgcaccgggcatatctttgggggcgcaagtaacccaagaacaggctcaggcaagtctgcaaaagattctggatcgtaaaggcatcaataccctaagtgcggtaaaagaggggcgaagctacggtatctggcacaatttctacaactctccttataacgttttagcgattcagagttttgctaaatggttctatccggaacaatttgccgacctcgatccaaataaaaccatggacagcctgtattctcagttcctggctattgagccaaccgggacatattgggttgattcaaagaaatagtctgtaacaggtaactgaaacaatgagtgtaactgcggaacccttaccaaaagtgaaaagtcagactgataccggcgtcatggggcgctatcaaaacatagtgcgccatcgattgttaattttggcggtattggctttggcaatcctcggctgcctgctgttggatttcaccatgggaccttccgggttatcactctcctccctgtggcagacgctggttgaccctgccagcgccgatgcgggcacccgagttatcgtgtgggatattcgtttgccttatgcattgatggcggtagtgatcgggctttccctcggtttggccggtgctgaaatgcaaaccatcctgaataacccgctggcgagtccctttactcttggggtttcctcagcggcggctttcggcgctgcgctggcgatagtctccggcattggcattccgggggttccggatcagtggtttatctcggttaacgcctttatctttgcgttgttcgcggcgttgatgctggacggcattacgcgttggacgcgggtggcgacctccggcgtggtgttatttggtatcgcgctggtattcacctttaacgcattggtttccatgatgcagttcatcgccagcgaagatacgctgcaagggctggtattctggaccatgggcagcctggcgcgagcctcttggaccaaactgggcattatgctcggcatttttgctctgatgttgcctctttccatgatgagttcatggaaactgaccgcgctgcgtttgggcgaagatcgcgccattagctttggtattgatgtgcgtcgcctgcgtttaggcactttgttgcgcatcagtatgttatcggctctggcggtggcattcgtcggcccgataggctttatcggtctggttgcaccgcacattgcccgtatgattttcggtgaagatcaccgcttttatctgccagccagcgccctgattggcgcattggtattgtctatggcttccgtcgcatcgaaaaacctgattccgggcgttattattcccgtcggcatcgttacatcgctggtgggcgtgccgttcttcctgagtattattttgcgccatcgggggaatgtatgaattcaggtttacgtattgagcattttaatgccggctatccaaaacgtccggttattcagaatctgagcgtacctttgctgccgcgtggcaagatcaccgtgttgctggggccaaacggcagcgggaagtccacgttattgcgttctttagccggtttgaaccgagcggaagggcagctatggctggatggtaaagatttgatgcaaatgccttttgcgcaacgagccgaacaagtggtgtatttgccgcagtcgttaccggccggcgtgcatttgcacgtattggaatcgattattgtcgcgcagcgggcgtccggtggccgtagtcatgccagcagcgaagcggaagtcatggcgttgctggagcaactgggtatttcccatctggctttaagttatctggatcaactttccggcggtcagaagcagttagtgggtttggctcagtcgttgatccgccagccatcgctgttattgctggatgaaccgctgagcgccttggatcttaactaccaattccacgttatggacctggtgcggcaggaaacccaaaagcgcaacattattaccgttgtggtggtgcacgatatcaatatcgctttgcgtcacggtgaccacgttttgatgttgcaaaacggtaatctgattgccgatggcgtaccggaagacgtgattactccagctagtctggcgaaggtgtatggcgttaaagggcgaattgaacgctgttcccaaggcacacctcaagtattaattgatggattagtcaccgaaccgacaatttaattatatattctcaccgccttattaaattatttcacataaataaggcggtgatattaagccgtgccccgaagttattataaaaataaaattcaagtggaaattccggaagcagtatttctgtttcaatgagcaatgactctaaatatataaaaataatatttatacatttcaatacctcatggagaatggtaatggcagtctttagcaaaacgaaaacagcggtattgattactgctgcgatattatctgcccaatcgcaggcagataataaaaataccgcatcgacagatactctggttgttaccgcaaccggtttccagcagcgtattcaggattcggccgcgtctatctctgtagtcacgcgtcaacagattgagaataaagcctatcgtgatgtgaccgatgcgttgaaagacgttcctggcgtagttgtcaccggcggcggcagtaaaactgatatcagcattcgtggtatggcggcgaaatatactctgattctggtgaacggtaaacgggtggatactcgcagtacgcgcccgaacagcgatggctccggtattgagcagggctggttaccaccgttatctgccattgagcgcattgaagtggtgcgcgggccgatgtcttccctgtatggctccgatgccatgggcggggttatcaacattattacccgtaaagttggcaaagagtggtccggttccctgcgtgcggatgccaccttgcaggaagattctaaatccggcgatatgttccagactaacgcctatgcctccggcccgttaatcgacggtttattaggattaaaagtcagcggtctgctttcacatcgcagcgaagataaaatcattgacggttataatgaacagagaatgcgtaatggtgctgcgacatttagtttaacaccggatgataaaaacgaatttgattttgaattgggtcattatgttcaagatagaaatgtgacgccgggttattctgtcaagaaaacagataaaaataacgacgttcagtatgaccgaaataactattctattacacataatggttattatgatttcggtaattcaaccagctatgttcaacgtgatgaaacgcgtaatccatcgcggaaaatgaaaagcgtcgataatgtctttaatacccaaacgtctttcctgctagataatcacacattaattctgggcggccaatatcgctttgaagaattgtatgatgacaataatcagctcagcacggctaaagatctcaagaaattaagccgctggagttgggcgctgtttgtcgaagacgaatggcaaatgaccaacgatttcgctctgaccggcggtattcgtatggatcaggatcagaactacgggactcactggacgccgcgcttgtatggtgtatggcatctggctgaggaatggacgctgaaaggcggcgtttctgctggttatcgctcacctgatttgcgtcaggcaacggataattggggacaattaacgggcggtggtaatggtgctccggcaataatcatggggaactccagcctaaaaccggaaaaaagcgtgagtgaagagattggcgtcctttgggataaccaggatgatctcaatgccggtattaccgtctttaatacccatttccgcgataaaataacggaaagtagacagtgtactgatgttgatgcaagtggcgaaccgagtggtgcggcttctggccagtgtagggtcaatggtgaaaacttccagtatatcaatgagcgtcttaacgttgatgaagcgaccatgcgcggcgttgaggcgacattcaattgggatatcagcaaggattggactttaggttctagctatacatttactcaatctaagcaaaaaagcggcaaattctctggtcaaccgttaaaccaaatgcctaaacatatggtaaacgctacgctggactggaaaacgagcgaagacctagcgacctggattcgggctaattaccgtagtaaaacctctgaatatctggatcgtaccaacctgaaaggccgcacgccgtcttatacctttgtagacctaggtgctaactataagctcactaaagaactccgtttaatgggcggtgtatacaacgtattggataagcgcgttgataccacggttagcgacaaagtgctggacggtcgtcgttatatggttggtgttaattacgatttctgattttttcttaattaaagcgattgatgaagccactgaaaagtggctttttttattcaatcttgtcgtgggggagcaggttgatgaatttctcgattttgcttccttcgtgctttttatggttttcaaaatatgaactttgaactttgaactttgaactttgaactttgaactttgaactttgaaatcggatcaggtttcagttgatatttgctttgtgaatatttcacttctacagcctcaaccaagtcaaagcgcgcaggcgcgagtcttaaccatccgcgcctccgcacaaagccgcttgctttacaggacacctcgttcatcacaccggctgacgggcgcctccctgctaatggcgtctcgctccgccgtccacggcgggttgccctatcctctgttcttcattcagcaggctgcgatgtgctcttatcttaaaggccgaattaaaaacacagaaaaccgaactataaagctttcaaaacatgatcctgcctgaattatcgaaaaccctcaccgcttttgtatatacgtcaacgccaacgctagcgccaaaaccaaccctttaataatatccattgcatagtaaggcactgaaagcatcaccaagccattttgcagcacgccgagaatcaccgcgccaatcagggtgccaaaggcgtttggtttgcctgagcctgccagtgaaaaaccgatataggccgcggccaccgcgtccatcaggtaaccgctaccggcgttaacctgtgaagaaccgatgcgggaagcgagcaaaatgccgcccaacgcagccagctgtgaggaaagcacataggccaaaacccgataacgaaccgtgcgaataccggacaaccgtgccgcttcaggattgccgccaatggcatacatacgacggccatgcttggttagcgatagataaagctgcaccactaatgtcacaatgagcataataatcacgatgacagggacttgccccaacgccgaaaacatctccggaatcagcccttcggccatatcgccactcggcaacagcatattctgggtgatagaaccgccgtagctgtaggtcatcgccacgccttgaatgacaaataagctggctagcgtcgccaacatatcggggatcttcagtaccacaatcaggaaagcgttaaacaacccgaccaaaccgcacaccagcaaagtcacaatgatagcgccggtggtaccgaagccgtaccagacaaacagcgacaccactactgcgttggccagtgaagcggtagagccaacggaaagatcgaaaccgccgatagatagtgatatcgatacgccgatggcgatcaccgtgacaatagcgatagatcgtaaaatattgatgatattgttcggatcaaggaagttatccgaagccagaccaaacagggcgatcaacgcaacaacggtaagtaacatcccccacttatacagaaaatcaaatagctgatgacgccagggctgcacattaggtaggggcgaatctttactcacgcgggtgttcctccggttgaaaatagtaatagcgtttcttcgttaatttctgcggcgttcagctcggccacgatgcgaccatcccacagcacgcaaattcggtcacataggcctaccagttcggagaattcacccgaggcatagataatgcctttgccctgacgcgccaaatcgtcgatcaggccgaatagttcctgtttggctttgatatcaacgcctttggtcggttcatcgaaaatcagtatctgtgcgtctccccgtagccatttaccgatagccactttttgttgattgcctccggagagtcgagccaatttctgctgcggcgcagaggtacgtatccctaagcgctgaatcagtgttttagcccagtttaattcctgtcggcggctgaaaatgctccagcgggagaaactgtcgtcggcgcatacactcagattcataggaatgctttcgtgaataaaaatgccttctttgcgccgttcttccggcaccagcgccaatccttgcgtcactgaacgatccggcgaatgcggttgccagcgctgaccacgtaattccgcctgtttcaccgtacagggcatcgcgccaaacagcgctttgcacaactcggtttttcctgcgcctgccaaaccggcaatgcctaaaatttccccttgatttagctggaggctgatatcgcgcagtttatgtggatcacgcaatccactgacgctcaaaagggttttatcgctgcagggcgggcggcggggagggaatatatcgtctagctgatgacccagcattttctcgacgatttgctcactgctcagcccggccatagcgccgtggctgataaatcgcccgtctcgcaacacggtaatctgatcgcaaatctcgcgtaattcatggatgcggtgagaaataaatacgatagcaataccttccgatttcaggcggcgtaccaccgtaaacagacgggcgctttcttcctgatccagcggagccgttggctcatccagaatcaaaaaacgacagtggtgggaaagggcgcgcgctagcagcacctgctgtttttctgccagggtgcaggattccaagcgctggcgaacgttcagcggtaaacccaattgttggagcaactgctcagcctgacgataaagccgcggccagttgaacaggtggcccgattctgccagcgttgccagcataatattttctgctaccgacaagcttggcaccaaagcaacatctacctcttgctgcaccacgtgaattccgagctgtttagcctgaagcggcgaatgaatatctacccgctgtccgtctatgaaaatttcaccactgtagtgaccgtgcgcaccggaaaggatcgccattagcgttgattttcccgctccgttggctcctaccagtgcatgggttgatccgccttccagcgagaaatcgacctgctgtaaggcatgaaaaccggaaaacgagagtgaaatattgcgcatttccaggcgagaaggggtgagggtaggcataagtttctgtaacggccccgctaaataggtgaataccgcccaatagttagctttatcggtggggtaataaaaacgtttcgtcaggcgaaaatcgtaaaaaaaacgtcaaaaaatgcgcttgttctcggtgttttttaacatgttttaaatcattagtaatgaactaatagggttaagctatagcaaataattattaaacatctttggcttagccattaagatgaatcagaccggacaggattaagacaggttagaaagtaataataatcgccgttgataacaactgaaaaaaaattcataacatcagcaaggaaatggcatgagtgcgaacacaatccgcgtgcaggtagggcctgccaactattattcttttaccggtgctatcgataagctgagtgaattctatccacagcccgtattggaaaaagcgctgtggatttatggtgaacgagcattaaacgccgcgcaggattatctgccagcggaatttcattccgccaatgctattaaggcgcgctttaacagccattgcagtgaatccaccgtggcagaactggtcagtgtggccggttccgagcgccaggtggtgatcggcgttggcggtggtggcgtcctggataccgctaaagtggtagcacgacgcttaggcctaccgctggtggtcattcctaccattgccgcgacctgcgccgcctggacgcctctatccgtgtggtataccgagcaggggcaggcgctgaattatgaaattttcaatgatgctaaccatttggttttggttgaaccgcgtattattttgcaggctcctgtggcctatctgctggccggtatcggcgataccttggctaaatggtatgaagccgttgtattaagcagcgatcctaaatccttaccgttgacggtgcgtctgggtctacaggcggcgctggatgtgcgtaatgttctattggaacagagcgaggcggcattgcaggcagtcgcgcggcgcgaattaacgcaggatttcctcgatgtagttgacgcaattattgccggtggcggcatggtggggggattaggcgagcgtttcacccgcgtggcggcggcgcatgcggtacacaacggattgacggtattgccgcaaaccgcacgtttcctgcatggaacaaaagtggcctacggaattctggtacaaaccgctttgctggggcaggaacaggcgttgaaagacctgattgctgcctttaaagtctggggcttaccaacccatctggccgcgctagacgtcaatattcgcgaccgtgatgccattgaacaagtgattacccgaattcttaagccgggagagtccatccacgcactgccaattagcctgaataaacagaaaatacgggcggcaattgagcaggtagacatcgctgcgcaggccttataaggcgtggtaagggctttttttcttcgcagagcgaaataaactggtttgggatggttttaacgtcttgtcttttcatctcggattagggcagaatacgcgccaagaaatagccgacgttttaaataactcgtcggttatttttttgcattcgtgttttcacaaatcaagaggccgggcatcgatccggatagataaataggtccgcgtgcgattattcacaccatgaaatcgccgttatgaggaaagaaagatggggcaattgttcactttagcgtcggtgcctaccggcatgcgctgcacacgcagcgattatggggcagcaggcattttttcaacccgctattccgctttcattaccccacttgcgtatcccaggcagatacgaagtttccccgtcacctctcgactttgtggtacaaacacaaatctggtcgaaggtatggggaggctgaatcatgtcgcttaatacagctgttcaggtcggcaccaatcagacaggcaccaacaatcgcgtccaactcagaaaaactctgacgttggttcaagtggttatgatggggcttgcttatctgcagccgatgaccatttttgatacttttggtattgtttcaggcttgaccgatggtcacgtcgcgacttcttacgccatcgctttgatcgcggttctctttaccgccgttagctatggcaaattggtgaaacgcttcccgtccgcgggctcggcctacacctacgcgcagaaatccattagcccacacgttggctttatggtgggttggtcgtcattgctggactatctgttcatgccaatgatcaacattctgctggcaaaaatttatctggaagccatcttccccggcgtgccttcgtggatcttcgttggggcgttggtcagcctgatgaccttgttcaacctgcgcggcatcaacgtggttgctaacctgaactccatcattgtggtggtacaggtagcgattatggtggtattcgtcgggctattgattcatggcgtttatcagggtgaaggtgcgggtacattagttagcaccaagccgttctattcagagaacgcccatttggtgccgatgataaccggtgcgacgatactctgtttctcattccttgggtttgacggtatcagctcattgtctgaagaaacgccaaatgccggcaaagtgattccgaaagccattttcctgacggcgttaatcggcggcattatctttatcgcggtatcttatttcttgcagttatatttcccggacatctcgcgcttcagcgatcctgatgcgtcacagccggaaatcatgctgttcgtggccggtaagttcttccagtctgtgattctgtgcttctcttgcgtcacggtactggcttcaggcatggcggcgcacgccggggtttcccgactgctgtacgtcatgggccgcgatggtgtattcccagagaaagtgttcggttacgtgcatccgaaatggcgtactccggccatcaatgtgctgttggtcggtggcgtagcgttgtctgcggtgtctttcgacctggttaccgcaacggcgttgattaactttggtgcgctggtggcgtttacctttgttaacctgtcggttatctcccagttctatatccgggagcgcctgaaccgtacccttaaggatcacatcaactacctgattctgccggtaattggtgcaggtaccgtcggcgtgctgtggatgaacctggaaagcagctcaatgaccttaggtctggtttggggggcgattggtctggcgtatatgctgtggaaaacccgtgttttccgtcaggcattaccgcagttcaatgaagaacttgcacgataataaaacttgattgatttgtgatgaaaagcggagccgattggctccgtttttttgtccgcaatctgcgggtaaaaagaattggccgttggaatagggcgaaatacgctgttttattatcagtgctgatctgcacgactcggcaacctgatgttcaatattggtgttatcggcggactgaatagcaccgccgggtaatcattttggcgagaagttaactcactaattcgcgagcataatcgtacaatgattttaatagctccaatttatctttatcactttcatacagattgtagaattgctccaattgctgcacatactcctgtacccgctcagggcttagcacttcgcggcgatggttaagccagcgctgctgctcgctgtcatccagagtattggggtagtttctggcgcgaaaacggaacagcaactcatccaaacgtcgatcctgaaaactcagatccagcgcaggcagattttgcggcgcagtttgctgaataatcttcattgccgctcgatcggcgtcactaaagaagccgtcataaagctgggcatccacatcgttggatgcagcaaaaggcggggcttcagcaaacagggcaactactttttcgcgtatctgcgggttttgtcgcaataattgcaaattttgcaggcaacgttggcgatcgatacctaaacgttcggcattctctgccagcagagttttcgctggagccagcactggacacttattgatatgcaccagtttgattggcacagacgattgattggcagaaagctggtctcgacgagtatataagcgttcacgcaaggcgtcggtatccagttccagcagcggcgacatatctccggccagatcgcacatgatgacggcgtttttgttatccgggtgccaggccagaggtgcaacccagctggtgttacctcgcgcagcaccaaacatgccggaaacgtgcaccagcggagtcatctcggcaatgtcgattaacgaattgattttatgcttattacgatgctgatagagataatcaaacaaccgaggttgcgcctgcttaaccagttttgccatcgcaatggtggcatgtacgtcagacatcgcgtcatgagcctgtaaatgttctacgccattggctttggtcagatgttccagtttaaagctcggcaggccgtcgtcattttccggccagataatgccttccggacgcaaggcataacatgcgcgcataacatccagtaaatcccaacgagaattaccattttgccagctgtaggcgtaaggatcgtagaagttgcgataaaagatattacggctgacttcatcatcaaatcgaatattgttgtaacccaaaatacaggttccgggcacgctaaaagcctgatgaatccgttgggaaaactcagcctcgttgacgcctttggccagcgcggtttgcggcgtaatgccggtaatcatcaccgcctcgggctgtggcagataatcgtccgccggagtgcaatacaccaccaatggctcttcgatgatattgaaatccagatcggttcgcacaccagcaaactgcgccggacgatccagcgctggatgttgaccaaaagtctcgtaatcatggacgtaaaacgtcggtgatgaggttggttttgccattcttttgtattgacctttattgactctggcttaggggctgagatttacccacggcagccactcactttgtaacaagaatatcatctcagcatagttttcacgtcagttttatcatcactaaaaccgaggggatctcgggttaccctagttagataagatgagaacgaccccgcatgtgaatcggaacataatgatatttatacttaaaaaaatattgaatcatttataaattaaataactttgactttaatgattcattaaacgagttatttaacttccgtttactcagccctttatacaatgctcgacataaaatacttaatagggtttgaaacggtgaaaacacttttattgaccggggcaacgggctttctgggcggggcagtgctggaaaagcttctgatagaaaattcggattttaattatttattattggttcgggctaatacaccagagcaaggcttagcccgtatcaaacataatttagaaaaattttatctttcgccccaaaatctgaataaagttacagaacgacatatattattaggtgatttggctgagccagaaagttttatttccgatcctcggttggatgaggttactcatgttatcaactgtgcggcggtagcctcttttggcaataatccgttaatctggaaggttaacgttgaaggcacactggcctttgccaaacgtatggctcaggtgacaggtttaaaacgctttgtacacgttggtacggcgatgtcttgtacgccggatgcaggaagtctggttgatgagcaggtattatctccggccagtgaggcgcatttagtcgaatacaccaaatccaaatcaaccattgaaaatctgctttcagaacaatgtcctgatttaccgctggtgttcgcccgaccgtctattgttgttggccatacccgcttaggctgccagccttccagcagtatattctgggtcttccgtatggcattaatgatgcggaagtttatgtgttctctggacgatcatattgacgttattcctgtcgattactgcgcagatgcattggtctgcttattattacatccagaattacctgactatatttatcatatctctgccggtgaagagaatagcgttagttttgccgaaatagataatgcgatgtctctggccgcgaaacaaaaaccagtgggaataaattatatgcaggttgattacggtgccttggtacaaatgcgtaatcagctgaaaaatatatttgggccttgtaatgaacgcttaatgctaaaagctatgcggttatatggctcattcgccatgctaaatgtgcgctttaataatcagcgattattgagtttgggaatggcaaagccgccgcgctttacggattatgtcgcctgttgcgtagagtccagccgcggtttaaccattcaggaacaaatggccatcgattttaaataaaattagtacaccttcttacccggcaacaacaattgccaagattgtcatattttatcatgtttggcggagtgccagatgttggttactccgctagaattagccctttcctgacgaatagggtgagtgtgctgtgcgccttgataaagcaattacgccactggataatttgatttatagcaattaccgtattgcccacgctttacgaattagcgtggcctttgtcctaacctttcttatcctgcgtttacttgccttcccggatgccacttgggcgctaattactttggtcgtggtgatggggccgctttcctattggggaaacgtcttttctcgcgctattcaacgtattggcggaactctctgcggggcagcttcgggtctggtcgcgctgtatcttcaacaatattctctaaccgctatgctcgcttggtgctttgtagtgatgtttgtctgcggttatttaaccttgggcaatcggccttatatggctttattgatcggtgtaaccttggcattagtttgcggttccggctcggtcgatatgagtaccgctctgtggcgcagcgccgatgttattttgggttctttactcgcgttgttatttactagcatttatccgcagcgggcttttacccattggcgtatgcaattaagcaccagcctccacgccatcggcactatctatgctgcttatttatcacctaatgtggtcgatcgtcctcgtttagaggacaaaatgaaaagcgagttagcgcgattggtcaaaatgcgcggttatatcgcttcggcgaccaaagaatcgggtattgataaagaggtatttaatgcgattcaaactctgtatcgcaatgtggtttctacgctggaactgttggccgatgcctattggtcgtctcgcgaaagccattttttactgctgaatgtccaaactctgcgccatactcagttgctaactattcgtactctggataatttaagtcagtgcctgctcagcggccagccggagtatgaggaggtcgccgccagcgaattgagtgagatcagcgtagaattggaaaaactgcttgaagttgctaccaaaaatcagcaaatcgaggcgcctatttatggctatgtgtggttgagcatagaaattacccgccaattgaaagaactgggcgatttgattgagatgaccatgcgacgctagccgattatttggacgcgaaaggcgatgaaatttctgtctgacgggtaaaaaaggtaagataagtcaatgaatcttgtctctgatggctgctaacctgtattgttaagatcgcgtgttgtcgcgacgtgatggtgaacagacaaccggccgtcagcaattgaatttgtgtaaaacttagctaaggtgtgaaaatggaaaatgtaagcaagccaactttccaggacgttttggagttcgtgcgtatgtttcgtcgcaaaaataaattgcagcgtgaaattgtcgataacgaaaagaaaattcgtgataaccaaaaacgcgttctgttgctcgataacttgggcgaatacatcaaacctggcatgagtattgaagacgtgcagggcattatcgctaacatgcgcagcgactatgaagatcgtgttgatgattacatcatcaaaaatgccgatctgtcgaaagaacgtcgtgaactgtcgaaaaaactgaaagcaatgggcgaagttaagtaacctgagcgatttagtttaaagattggagagccagattgatgtctggctctttttttatctattgaaagtgaatatccaaacccgcgagttaggaaaacctttgatttagcgtaatcatgggcataaataatcgccatttagcacatttgagcgatggcgttgttgggaatgcctggcaatgttatttgccggataattacattatttgcaatagcaaaaagcccgactaagtttccttaatcaggcttctttaatatggctcctctgactggactcgaaccagtgacatacggattaacagtccgccgttctaccgactgaactacagaggaatcgtgtgaacgaggcgaataatagcgagggcggacgggtttgtcaaagtagaaaaccattaaaaacgtgcgtttgctgagagaatgagcttattgtcttgtttttcagcaaaatcagctcgttatggtgcaagattatgctgttttatttcttttcccctttgcctgtaacaaaggggaatgaggttgataaggagaaataagaaagaacaacgcttaggctttacttctgcgcagtaatattcgtgggaaaagattatctaaaacccctttgccactgagagtgaaggccgaaagcagggtaaaactcagagcaatcgagccaagaatgaaataggtatggctgaaaccgatctggtcatacattttgcctgcaaaggccgagagaaatatcgccgctacctgtttggagaagcaaaaaccaattaaatagatggtggcggaaaatcgcacgtcaaatactgaggtaatgtatttgaaggaaccaatgagcaggaagggaacctcaaaagcgtgcagcatcttcaggcaaatcacttccagcggcgttgtggcgaaagccgagccaaaaatacggatcgacataaacatcccagccatcagtagcgcatttttgctaccaatgcggttaataatccagggtgcgcagaacatcagcagggcgttggccaattctccaagcgtggtgacatagccaaatatttcggtgccacgttgtttcgactcaaagaaggacttaaagaaattggcaaactgttgatcgaaaacgtcatagacgcaggcaacgccgatgatatacagaataaatagccacagcttgggcattttaaacagttcgccgaccattttcaggttaaatagcgattcgttggcgcctaattgattcattacttcggcggagcggtttttatgaggtttggctattaacagtaatgtggccaatatcagagcgctgcctgatcccatccaaaacaccaggtccggattgacgttaaacagtattccggcggtagaggcgcagattccccagccaaaacagccaaacatccgcgcttgtccgtattcaaatccgctggtacggctaactcgctcgacataagcttcgatagcgccggagccgccggagaaaacaaaacccagataggctccgccaaccaaggatccgagcagcgtgttgtatttcagcagcggcgcgaagatatacaggaagaaaggagcaaagaagattagcagtagggtaatcgtccagagtagatgctttttcagccccagtttatctgaaagcacgccgaataccggttgaaagcaaatggcgaataacgatagagaggaaaagacgattccggtatcggttttgctcaggccaatcacgtcggctaaccaaatcggcaggaaagggaaacaggctgccataataaaaaaatagaaaaagacaaaccaaccaaaaatccaaaagttagagttattcttattaaagaatgggctactttgcatacaacccccgtaaggtactcaatatgttctgcacaggttcgctggttatcgttctcggccaggtgcctgccagggttattcatcagggaaagcgcgacgaacctcgccgcgcattaccaacgggaattacaattgttcgaacttgatcaaaatggcactttcaggatccagcaccggtaaagctaaaccaacctgtgccagccattctccattggcttcgatcggctgaatcatccatgggggtaatactttcatggtatgcccgccttgctcgacgctaatcagttccggtacgtccagcaggctaacgcggtaacgagcctctggacgtagataaggcatacgtaactgaccaggcagagaccaggttggcatcgccagttggctgacaatcagtagcgcctgatcctgcgattcgctgactacgccgtgcagcagggtcgtgggatcgtggctatccagccgcactacgttgccactgtgtaataaaggtcgcaaagatttgtgcagggcgatatagcgggcaaaaccgcgctgttcttcgctgctttctttcaccggatccaattccacgcccatatggccaaatagcgcagtcagtccacgaaaagcgatattgtgctgccgataagtggtgtggcagagtttgccaccaatatggcttcccatgacttccggcgggaagaaataactcataccgcgttgaattttctggcgttccaatgcgtcattgttatctgaaggccagaagcgatgggtgcgtttgagaatttcatagtcaatacgaccgccgccggaggcgcaggattcaaattcgacgtgaggatgatgcaattgcaaagtatcaagtagacgatacagcgcttcggcttgcccggttgaccccgcgcgcccctgatgaccgggctgaacgatttcccgattcatatcccattttacataatcgatgtcatgctcacccagcagccagtccattcgcgctagcagataatcgaagaccgccggattttgtaaatccaacacgtattgccagcgtccggtcggctgttgatagccgggaagcgccaatagccagtccgggtgtgcacgatataaatcagagttcggattaaccatttcgggttcgacccagataccgaactccatgcccagatctttcacctgctggataacaggttgcaagccgttggggtatttcttttcatccagataccagtctcccaacgccgctctatcgtgatttcttccttggaaccagccatcgtcgataataaagcgctcgacgcctaggtcggccgcctgccgagccatcgacataatgtactgcgggttgtgatcgaaatagatgccttcccaggtatttagatgcaccggccgggctttgggctgcgggaagtggacaatgtgttgacgcacgaagcggtgtaactgttggctcatgccattcagcccgtgattagaatggctggcatacagccaaggcgtggactggctttctccttccgccaaactgacttcacccggtaaatatagcgcttcggcctgaagcaggcgacgtccatcggttttcacatcggcgcgcagacgatggttgccgctccagcccaaatgaataccccaaactttaccttgttgttcactataaccgtggcagccgagcaccatgccggggaaatactcgtgggagctacgaccccggcggttttcctgctgatagctaccgtgctgcaaggtcacgcggtggggctggaactcttttacccagcgaccatggaaagccatcacttcatcggccgtttcattgactggcagcgtcagtgccagacgatccagccagtaattttcgcagcccaaattggttaagctgttacgcaggctaagaacgccactggcgctatccagattcagctctgaggtcaggcgcagtcccgcgatatcatcttcgccaataatcgttagctgattatttttatgctcgatttgggtggtaacaaacaccggcgaccagtcctttccgtctcgatgtccttccacgctggggcttccgaacaggccatgccccagttctgccgccagcgttagcggtacgtcaacgtctaaacgtccgtgtggcactgcccgattcagggtttgaatatcttcggcattgaaactgtgcaggtgcggtccccaataaagaatttctgcatatggctggcaacgaatgatgacgtcagtggctgggctttccagtcgcaggatgcttggttccatataatcctctcggtaagctaggaatgaatcagtgaggattagcattgatccgaaacgtttcggcttaaaccgaaacgtttcggatctgtgatgaagttagaataatatcgagtcaacaaacatcggatacattaaatttagcgatggagttaagtgaaaagaatggtttttttctttttaaatcagagtattaatttgctttgtgcagtgtgtccccaacgcctaactttggttgccacaaaacctgtagctgttctactggcgcaccttcaattaaggccaacgtcatatcggcgattttttctccaaccgcagcacgagtctcttgaacaatcggcgtgacggtggtttcaaccaaagaatcagccggtaatccatcaaatacaatcaatgaaatcccttgagaacccagcaggttatgttgctgtaacgccattgctgcgccgtctcccagcatattactgtcggttactatggcggtagggggctgcggcaacgccagcaagtgcagagtggccagatagccggcgcggcggttgctatcaattggctgctggtaaccctcgtccagcggaatctggtggttagccaatccatctagataaccttgtaagcgttgattaacataggtttgctggctatttccccccagataggcaatacgtcgatggccaagttccaccagcttttctactgccagtagcgttccggcgcgattatcaaaatcgaaccaggcataagggctatccagtgagctgcggcccatcgctaaaaagggtaaatgatgctgagccagatagcgtaaacgacggtcattctgctgcgtgtgtgccacgatcaacgcgtcaacccgctggctttctatcaggcggataaacgacggatgttggtcatgagatacatctgaaaccagcaataaatcaatattatgcagtgccagcgcggcgctgatggtactgatggtttccagaaaggaggcgtcgttaagcacgttaggttgaaacggataaactagcccaatcgcatcggttttacccattttcaagcgccttgccaaagcattaggacgatagcccaaacgttcggctacggcttccacccgctggcgagtaatggcggatacatcgctgtagccgttcagcgcccgactcaccgtcgtggtggacagctttaattctttggcaatcatttttaacgacatagggatctcggcaggaagaagaaaggaattatcccattgattcaatatggtaataatttagggcgttgggcagtgaaataccagaggaaatgcccttatttgcgtgccagaccgcagggaaataagcggtaatcgctgtgtattaccgcttcaggagatgaacgaaagcctgcaggacgcagattaaagcgattgagtctggctaatttgagccccgctatcgtcaaaataactgtatgtcagcgtggctccgtgagcgttggcgggcagggggttttcggtgctgtactcacgttcgctgaatggtggggtcatcatatccatttcctgcaggatattaatctttttccctttgagactcagcgtcatttgcccgaaagagacgtgatacggcgtgggattgtggctccgcagccgtgtttcacccgcgttctgtatcagcgtgaaattcactttcttcatcgcagcttcgggggagtgagtcagtccttttgggcgataaaacactttcatttgggtgttcatcgccatggcgacctgcggattatcttcattattggaacgctctttcggcgggatctcgtacaaattcagccaataaacggattctcgatcgctggcgggttgattacctttgctaatgatacgcaggctttgcattgatcccggctgcattttaaaaaccgcaggcagcggcaggaaaggggctttggcctgatccggcgtgttgtctacgtcaccatcatcaatccagctttgtaccactacgggatatttattggtattagccagcattagggtattttctctttctccctggagaaagattattctggtggcggaggccacaataccggcatccgcattgagactgatgataaatagcagcaacatggttagtgcggataacaggtttttccgcgtgcagagcgtatgaaatcggatcattgtactttcaccaaaacgtatgcggtggcatcgattttaccggcggttggtgcgctccccggcagttttttcagcgtagcggtaaattgggtggtgtaattgttataaccggcggcgctgctgccgttggcattggcgcccgcgagaatgggataccacccagcattagcagtggaggtacagttaccgctgcatcctccccagccgacaaaattcatcggcgcaccgctactgtcttccagcgtgataccgacaccggtggcgatgcggctgtcggtgccgtacagatcggaaagcaaatagctcacgccgcccgccgtattcaccaaacctaatccctgcgctttcaaataccccggtaaagaggtttggataccgattgaggtttggccgctattgataccggaaatggttcccgtctggcattccacatcgacattgatgctggcactgcgggtttggtcttgcgccagttcgctaacggtaatcgtgggaaaaaccacataaggggtgacattgcgcaccacgcaggtgtttttacggctcagggatgagaccggcgcggtattcatgccaaaagccatatagcgaccggaaccccaggtatcgaagcgggtggaggagtcatagcccgtttccggcacatcggctcccggccctttgaacaccacatagccatttggctgattacaggtgtaattaccggaatatgtgtctgccgccgggccgggacagccccaggttgaggggccgggagtgcgatccaccgcggcgactttttttagctctgcgcgtatctggctgaaatgtttgcctttgatttgaattttattaccgagtatgtcgtatttagtcagacgaacctgctgccagattcgggtgaattccatgccggaatccacgtgaatcagtttcagcgcggtgtaagggaaaaaggtttggaaatagttatcccccatattggtatagccgccgacgttactgtcgccattggttgcaaaaacctcgtacagactgtctttatccgccagatcgcactcgtagagcaccgtttccggattggctaacgctcgcgccggaaccagactgataatgctagaagccagaatagaatctactggctgaatataattactggtcatattgatattgccaaagcgtaggggcgcgccgttgctgtcgccgcccaggttgtatcctttccagacgcatttggcatagccgggcaggctcagtgtgagcgagacggaaaatagcgccagcgggagaaaatagcgtttaagcgtaattttttggcaatacgaggttgatgacatcatataacttcctgaattagtgcatatcattggcacaaagtgcgtcaaaagcgatcagcggctgtttatcatcaacgccgtccaaatcgtaaggcagaatgcagcgctggtggtcgccatcgccccatttaatcgtgagttttccctgtcgttcatcggcacgcagataagcctgaccggcctgtccaaccatgcccaccacgatattttctcggttatacacgttggctcccatcggaacgatgctggtatccggacgcttgatggtaatgagcaacggatagccgtttagggtacggaaagtgactttcaccgcggaaccggcataaggcgcgatgcggcgttcgccgtcctgtaattcggttttgaaatccattccctgcggatccagggaaatagtgttgtagcgataaggggttaaagtcggcaccaatgcatagccgaagcgatcgatactggcaccttgcccgtacatcactttggctccttcggcacctttggcttccactaacgcaaaggtttcactgagataggggcctagggtgacgccaccgccgtgcacggcgacagcaccgcgcgcgctgccagaggcctgccagtaaccggtactgagtgaggcgctgccgctcaggctggtgaccggcaaccgttgttgcagactgccgctccaggtgttttctttattgcgttggctgcgcgagaaatccaggctgtagctggcagactgatcttcaccggtgacgcctgaaagagaggtttgataattggtaccgctactattgctgtgaattgcgccgatggaaacataaggtgcactcgggctgcttcccagagggaatgacagagacagctgtgccagcgtttcttttccggcgggcgtttgtaagccgctttcgatcggcatacctgttatcggatcttcaaaattgccgctgccggtcgagccgccggtcgtctggcgtgaaacggagagattcacattgacctgattccagagcagcgtggcgtaacctagctgcaattggttatcccgactgcggccatcgcggtaatcctgcgacgaggcggtgaaatacagcgagccatagtcctgcaaactctgattcatcgacatttcaacccgcgagcgctgctggtagctaccggactgccaggtttcaccgcgactggttgctcgaacgccaatgacatcgcctaaatcacgatagccttcggtggaataacgatagcctgccagagataacgtggtgcccgtcggctgaaaggtgcggctaaaggaggcgcgcaccatccagccgtcttgatgttcatcattaggcagttgcgcgctggagtaagtggtgtcgaagcccagagcgccaatatagtgagcgaacacgccgccgagcataacgccttgataacctgaggctaaacgcaggcctccgttagcggtcagggcgttactgataccgtactgataggttagctcgctaaatgtttcgccattccccacatcgcgtatctggccgctggaaaaactgtagcgtgaaaaaccggggcgcagtgattctggcaccgaagaaaaaggtacgcgaaagctgctggtggaaccgtcggcttcggcgatgatgatcgttaaatcgccaccaaagttggtggctgaaagatcggttatttcgaattgccccgcagacacggcagtttgataaataggacgatcattctgataaaccgttacgttggcattggttttagcgatgcctcgcaccaccggcgcatagccgcgaagggaatcgggcagcattcggtcgtcggttgccatggtcacgcctctaaaacccagactggaaaaaaactggccggatgaaaacccctcgcccagcgtgatttcgctgcgcaggcttggcaatgcgcgttgagcgtaaacccgcgtggtcgtccagtttccgccgcgattattgtcatagcgaaaggagccctgttggcgtaaacgccacatgccggcgtttacgccgttggttagcccaagataagtggaatcggtattctgcgtgacgccgttgcggttataagctacgtgatattggttcagattataattactgaagcctatgctatcgccgacgttgaggtttttcggatcgacataaccccgaggcacctgcttcacaaaactttggggtacgcccagatcgaagcgtaataaagaataatcaaagtgctgagtgttgcccggtaataaaatttccagaggctgacaatctgtttgtttcttggcctctgccagtgctttatcggcaatgcccgcctgagccaattgttcgagagaaaaacaggcctgaaccccagcggtttgctgcgtgaatttcagatctattctgtcgataaaatgattattcatatagagatcgacctgatagatgccgatctccagattattcgctttattaaatctggcgagtgatccttcgcctagtggggagccacgtaataaggcttcttcaaaaacgtattcatctctattgccatcattaggcactgaggcaaaggcggagtgcgttatcagcaaacccggccccagcgtataagacaaccaagagattaatttcactttctatacccactgatttcttgattaaacataaaccagttataagctataaatggttgagatattcgctccgtagtcgttcactaacgtaagggtaagttgctgacctttaatcgcttttattccttctggaatcgtcagaatcgacgaagattttggggataccatctcactgctggcgaaagaaatgattttattattcaccgtcatctgcgcgtctcgtaagctaatgaaatatccggttgggttatttatgattattttctgtccggtattatcactgaggctaacttgtattttttcatgcaggttatcggtgttttcattaagcgcggttggtcgataaaataccttcaggcgattttttacaatcagcactaatttattattggcctgtttatccgctttcatggcgggaatctgtagaaagttaagatagaaaacggattcgcgatctttggggagattacgttcgatataggccagacgaactacctgaccgctttgtggctccatacgaaatatttgcggagtcagtaaaaaaggcacgtcgtctttggttggtgatgactggttattaccatcatccatccagatttgcaccaaattcggattatcgtctttgttgctgagctgtaatattttttcccgcgtgccttccggataaaccacccgcgtgcctgtcattacaacgcttgcctgcgctgcaaaagaaacaatgctggccaaggccagcaagatgcaggcaatgatgtttttagcgtatatcgtcattggtatctcatattcttggcgtgttgaattaattagcctgaacgggtaggccagcatcactggaattatcaggggtaagtaatggcgtattgtgccgaagccatcacgctaccggcgaccgcatttccgctttccgaaatatattgcacggagagatcctgagaggccgaagttgcgcctgttgctagcgtaattcccggaacctcaacggggccggaagttaaaatgaccgggcgatcggttgagtctaatagttggattgccacaaactgagcggtaccggtgttacccaaatttccggctggggtgacgttcattccctggaataccgaactgattttggtttctttgctggcgacattacagccggtcaggttgatggtgaaattggttttaccagcgacgctattggggccggacagactggcggaagcgacggtgggcagtaatacaatcggcgtatttgccgagccatttatatcgacctgacaggtttgttcagctacctcaccctgaaacttaatggtgttattagacgtggcagccaatgcaacaccgggcaaggtgaatagcagggccatcagtagcgttttattcattctgatctcacttactttatatgatttaaggacacagacttgttcgggggggagggcaagatctgcgaggcacggacgatggcgatatcaacgaccgtggttaatcagcgcgtagtgtaggtgggatgacctgcaagcagaatgagaggcgtctttgatttctataggaaacgtcctacaagctttgtaggataaaggctactagagctaaataggctattttttaggaggttgggtattaataaaacggcgattggcgctgagctttgttttgttatagagaagcgtcatagagagtaggcagaattaaacgggtaaaacgccctctttcggtgatggcgttattatcaggcgcgggtacaggccgtttgcccgaattaccgggcagcggctttggcaatttgctcattggtttgtatcaataacgcctgccatattggccagtgttcggttattgcatgatgattccgactggataacaaatcctcaaacagaatacagcttgcgactaaatcctccgcggcgacaaattgaacgccgccttttatgcgatgtatcagattggcaatttccttgtaatctgtttcccgttcgaggggattgtcacttagctgagtcataatttgctgtaggcgcgccaaatccaactgattactgctcaacaacgaggccaatagctctttttccacaccagcgttgccaccggaaagctggcggagtttactgtgcattgcgcgcgtatcttcagccgcctgcatcaactcagtcgggacttgggcggtgataaaaccttgctgtgccagaatcatacgtagggaatccagcgtgacgggtttaatgaggcaggtatccattccggctttttgacactgcaacacgctttcttcacgagcatcggcggtacagccaatcacaataatatgacttagccgctcatcgttacgaatgcgataagtcagctcaaaaccattcattaccggcatattgtaatcggtaatgaccagatcgaacgtttgttcttgcagcagcgcccatgcttgcgcaccatcattggcggcgactacctgcttcaggccgatgaacgccagttgctggcgtaatactttacgattcacctccatgtcgtccaccaccaaaatattcagatggctgacttgttgcggcatcgcggaaagtctcggtggattatcggttgccaccggtgtcagttccgccagcgtcagaggcagcgtgataaacaggctggttcctttgcccagttcactttccatagaaatatcgccgcccatcttcatcaccagttggcgacaaatccacaggcctaaaccggagccgccaaaacgcggcgatccaccctcattggcctgactgaatggctggaacagtgaagcctgcgccgtatcggaaataccgattccagtatcggtaatatctatgcttattattccctgctgaggggcggtggtttcccaggtcacatcaatggaaacgccgccttgctcggtaaatttcagagcgttgcccaacagattgccaacaacctgtttcacccgcagcatatctaccaacaataatggcggtatttgatcgtcaatccagctggaaaagcgcaattgacgctcactggcgataggctgataaatttgcaacaaccgctcgaattcagcgcgaaaatcggtcgcaaccggatgtacgctaagttggccagcttcaatttttgccgagtcgataatgtcatccagcaggcgaagcagcgattgagcagaattagacacggtttttaacgtttctttttgtactggctgttggccacgaatttccagttccagtagccctaaaatggcgtacatcggcgtgcgtagctcatggctaatggttgccaggaaggtacttttggctcggttggcgctttcagcctctaatctggcggcttccaactggcgctcgatgtttttacgctggctaatatccagccagccgcctaatagccctttttcagcgctatttaatgggataatccacaggaagatatcccgcagctcgccgccaatttcgattgaaatatccagcatttgcggctgcatatcctgtaatacctgttggcataaatcatcaatttgtctatccagcggagtaatgagcggccagtcggcattgtcgccattttgattaagcagatcttttagctcatcttcacgatcggcggcaaagtaacggttgtaggtcgctaactgcccgtcggcggtgcggataaacacagcgaacggcagggcattaatgatcgattcctgctgtaataatcgggtatgtaattggctggcttgacgccgtttattaaataccaggtacccaaggtataaaccgcatagcaacagcaccgcagagctaattttaagcaacagcatcagccattggctttcaatagaatcatccgaggcatacacaggtttgggtttataaacgctccattcgctaataatgctatccagatcttccggtgcaatggaatccagcactttatcgataatcgcttttaactctggcacttccggccggatagcaaaagccatacctaggggctcttcactcgcgaccgcaacgattttaatattgggtttgaaatcctgcgaagcaataaagttggcggtcatcatatttttcaaaatagcgtcaactttgccctgctgtaaccagcgcaccagcgtcatggtatccggcgcttcgataaaattaattttctgatttaagaatgggttggaaataatattattagagacgctcccggcctgtaatcccacgcgtttaccggccagatcggcgacattattaatatccgttcggtcttcacgcactaatattccccataatgactgggaaaagggcgtgctgaatagcgcatcgttataaaggccatcgcgaactgccacgccgggcagcatatctattttcccagcgcggaaatcttgcagcccttcaccggtattagtgataaaaacgggttcaaatttaagaccggtacggcgggcaatcaaattaatgagttcgacagataatcctgccattttcccggtacgacgatcgcggaatataatgggagccagatcgagcggagccagataagtcacaatcggatgactatgaatccagtctatttcctgctcggtgagcagcattttggcatcgatattgtagtgatgtcgactcccaaaccagcgctgttgaatatcgccggttgcccggctgggcagcaattccagcactacattgagatcgtctatcagcttttgattgctggcttttgccagaaaggaataaggcgccgggtgatagggggcgaaattgcggatttgtaacgtcagcagctgtagctgatcgattaagtagttggctgaggtcgcgttagcgacaaaaacatcggcgttaccataggccaccgccaataatccttgtagttggttgggataggcgacgatattatcattatgataattaaataaaaattctggtgatagcggttcattatttacaatcgctacggtttcaggatggcggcgttgggttgggtcccaatctttgctgcggacttcgacgtgacggttagtgaagaaagcgtgggaggcaattagccccggctgcgccagcatcggcgttcctgccattaaatcaatctgaccgttttctaacgcattgagcaccagcccgtaatcgcagtatccgatcatctggaatgataactgactggaatcactaattatttttagatagtcggcaacgatgccttcgattgaattatcatcgcgattcacgacgaaaggggtgttagcgtcgatcaccacgcccactctcagggtgcggcggctggattggcgcgtatcgatttctggcgttaacagcaggtcatcgctgtaattcttggcgatgctatgtaacgttagcggttggccggtatcacatcccagccggctatttatcggtgcggccagcgcaggcgcgacaagtataaatagcaggaaaaacagccatgtagatggctggctacaccagattgtgggtatgcgcatagtcagccagctcaatcactgaggatagccccagcttggttaaaatgcgggttttgtaggtgctgaccgttttattactaataaacatctcatcggcgatttgtttattggacaatccattgaccagataacgcaaaacgttaatttcccgttcagacaacatgcgcgcgcggttgaccgaatcatggctggaaggttgcccagcgagctggcttaaggcctcggatgggaagaacgaataaccccgcaggacgttttgagcggcgaagagtatttcgctaatgtctttgtttttgctgataaaaccgttggcaccagcttgcagtgcgcgcacggcaaaaacctgttcgtttttggctgacaagaacaacgacttgccggtgaatccacgctgttgcagttttttcaacaaagagaaaccgtcgaagttgggtaattcgatatcaataatcactaaatcaacaggctgggcatttaacattgccagcgcttcattaccgtcggcggattcataaatcgctgagaattcattgttctgcgataataaggcgcggatagcgacgcgaattgcgggatgatcatcgattatcattacagacttcataaatactctccaaaaaacgttattttaaggatatatcaagcatagcatgctgaatttcccggctgacagagacacgaatagtaagataaaagagaccacaattaatgactaccaatccgcaatcaaacagattctaatcactgctaacatattatcaagaaaagaattttttgattacaatccgttattgtttcatcgcgatagccagcttctgatctaaagaaaaatgaatgtattcggcgttgggatttatcttagcttaatcataatgctagattttaaattggaaggaatatataaacttattgataatgaatactattattcagcgattgtgatgcgtttaaattttcccgtcgggtttcgtgtaaacgtaaataaaccgcacaaaaagatcctaacgtaaaacacataagcaaaaaacccgactaagtttccttaatcgggcttctctaatatggctcctctgactggactcgaaccagtgacatacggattaacagtccgccgttctaccgactgaactacagaggaatcgtgtgaacggggcgaataatagcgaggtgagagggggatgtcaaaggggaatacgttaatttcgatcgtttgctcatagaatgcgcaacttattgagattttgtcatttttcgcaccataacccgcctttttttgcatatcaagcagattgtaatccctttgcgagcgccgttaaggctggccatcgtgtatggccaatgagcaaataggctttttggtcggttaaaacgaacatgccgtagggatgaatctgcagaaaataactgtcccccggtgcgggttgaagttgacgatatagcgactgtggagcgccaatttgcatgattttgcctttattcatcaccaatacggtgtctgaaacggcaaagggttcgctttgaacgtgagtaacatgcagtgaagggatattaaactgctgctgcaattcacgaattttatcgcgcatgctgaggcgccggttggcacccagattactagcggctcgttgaataacagtaccttgggttttaggagcaaagcgcgagccagggtcacacgctgttgctggctgccagaaatttgaacgacataacgatcggcaaaaccgcccacacccgccagcgcttctttcacccgatcgttaatttcagcctttgggcgaccaagcattttcagaccgtaaccaatgttttcccctagagacatatgcgggaacagggcgtaggactggaataccacaccaatatcccgttgctggatggaacggtcagtcacatcctcaccgtcaataaaagtttgttcgtcgctgaagccccgacctaatagctgagtaaagttattcagcggcagagtgtcatccgcgcaccagtggatggtgaaactgccgtagaaaatactgccggacagcaagatgttaaaggcgatcccgacatacagcatcgccgtggtaccccaaaccagtatcaccggtagcggttgtacgtctgcgcgagaggagttaccggaaatggtgacgtaggaacgtttagctatccacatataagatcagcggcgccaaacgtaacccttgcggtagcagtatagtggcgttctggctctcatcgctcaggtaaaaactgatggtccaaagagccagtcaactgagggtgaaggatctcgctaagaatagcgaaatccccagtgagcggagccgtagcatgtcagtgagcggtcagcagttgatggtgtagtgcaaagtgaaccagttcgaccgttgtttcacagttcaacttacccaaaatattggcgcgatgaacgtgaatggttttatggctgagagcgagctgatcggcaatggactttacgctaacgccgctgaccagaagttgaaacacctccttttcccgaggcgttaagacattcaactgcttaggttgctgaggcatgtggcgcagcgcttgcagcgcattggcacacagatacagcccgccgccgctaacggatcgcactgcctgcaccagttcttccgggccgcagcgcttagttaggtaaccgctggctccggcatcgaccgcactttgcacaaaggcggtggtgtcataaatgctcagaataatggcgcgaaactgcggatgctgttggcgcagacgcttgagcaggctcaacccactttcatccggcatagagatatccagaaccgcaacgtcaacattggtggttagcagattttgccaggcttcagcggcgctgccgtactcgccgacaatgcgaatatccttttctaaagataataattgagcaaacccggaacgaaccactacgtggtcgtcaatcagcgcgacgtttatcataactttgtaataatttgggagagttataaacatcatgcttatcaattcttgtttgggcaataattgttagtgaaaatgttgagaggttaacaatttaaaatgaagaatgatcgaaggggagaggcacccccctctggcgtccgtaggatttcggcacttgccggagagggatggaagggcgatcaacccagcgttttggcgcgataaattcgctgtggacgtccaaccttgccgtaaatgatttccgcctgtagcgcattgtttgcagagcagaattccagataacgccgagcggttgtgcggctgagccctaaggtcacggccacgttttcggcggtatactcggcatcactatcggcgaataaagcctgaattttatccaaagtgagctgatcgataccctggggcaataccgatttttgcgtaccccgggcgtaggtgttgtacattgcgtcaatttggcgctggctgactttatcgccttcctgcaaagcatgatgccggtgactaaagcgttccagagagtgctctagccgctcgtaagccacgggttttatcaggtaatcgaatacgccgtagcgtaatgcttcagcaacggtgtccatatcgctggctgcggtgacgaaaatgacaccgaaattgctgccttcaagagccagttccctcaggaattctagcccagagccgtcgggcaggtagttatccagcaggatcaagtccggtttaaaacgtgccgccatgctacgcgcctgctgtagatttccggctaaccatacctggcggcaataattgctttgcttgataaactccgcgtgcatttctgccagtggcgtttcatcttccaccactaaaatgttaagccattccatgggatcccctagcttttgagatcataggtctttggaataaagaccgtgaataaagtaccctgcggtgggttcttctcaacggtgatggtgccaccgctctgatgaacataagtcgcgaccaaatataagccgataccgtgttcctctgagtgtttggaactgacaccgcgctcaaacaggctgtcttgcagctcagggtcaataccgcaaccgtgatcggcgacttctagaatcaactcatggccttcatcggataaatacatttcaatatttttatctccatcagggttcttcagactggcttcaaaagcgttatccagcaggttaccgatgattgccgctagctcattttcaccgagagttacaggcagtatgcccaactgacagccgggaataaaggttaagctcagccccaactctttggctcgatggtattttccaaacaacagtgccgcaatttgccggtttttaaaggtatcgcgcagggtatcaatgagcgcctgctgggaggacgattcggtttttaccatctccagcgcgcgatcaaactccttcatttgcaataatccgctcagagtggacatccagttgagatgttcatggcgaacggtacgtaaattttcaacatactgctttatctggctgagctgtgcgctgagggtataaatatcatcctgactgcggaagctgaccacccagccttgaaaaatatcatcagtccaaataccggcacggtttgcgatgatatttaacccattaaaggtacacaactcatcctgtcggtttccgccttcccgatcgaggaagaaatgatccggagaaaccacttcgctaacgctacggccaaccaattgatatggcgtggctgatacccgtaacattttacgagcgttttggttgattgccgtgatcttgccctcaggatctaccgccaatagtccttcaaacaccgccccaaacagggcttcctgctgacgaagtacccgcgcgatctcctttggttccattcccatcatttgacgacgaatatgattggaaaacaaccaggcaagaaacaacagggtaatcaaaataataacaaaataactggtgaggggagtgagataactcaaacgccagtgatcgattttactgattagatagccgagggacactacgccgataactttgccatcgctatcaaagatcggcgttttagcccgcatggctttccccatcgatcctttgccatagatgatgtagctctcgccgcgttccagtgcgccttctttagtccactgcatcggcaggccgattttgtccggattaggatggtaaagacgacgggaattggcatcgccaatcacaatgtagtcaaaatcggagctggtgcctagccgtgtaacaatttgggctaagcgttgttggtctcgctgcttgaccgcagaaaccacggagtccatagaggcaacaattttggcctgattcatggccattttactgacctgattgatcagatattgttcgaaactatgggttagaaagcgatccattgccccgatcaggataacggagaaaaccaatagcattaaaaatatgcgcagcgggaaggcaatgttctttaatccacgccatttaaaaaaatgggctttaccagaaagcacgttattcaccttttatggctgaatcaaataaaacgacgagtaacataatttaaattaaatgattaatgcaaataaaaaatcattatctctaattaaatcaattaaaatcataaaataaattatatttactaaattaactgtgaattaggtcaattaaccgagaagtttttatgtttagcatatatttctgaacagggctttcaaaaagtaagaataagaatttataagaattttaatgcgttaattgcatttatacttttaataaaaagtcatgattcatctgttaattgcatatgtttattgtgttttatttgttatttaatggttattccagagagaaaattatggatagggtatttaggataattaagcgttcagaccatcaaaggattgtggaaataacgcattttttacgtgaaaacgacttaaatattgatacttccgttgaggtgtttattaccgtctcagtagatgaaagattggtagcctgcggtggaattgctgggaatattattaaatgtgttgccattagcgagcaggtgagaggggaagggctggcgctaacgctggcaactgaactcgtcaacctggcctatgaacggcaccacagccacttatttatctacaccaaaattgagaatcagtccttatttaaacagtgtggattctacccgattgccagtgtgcccggcattgtggtgttgatggaaaacagttcctgccgtctgtctcgctatgcgcgccagctctcgaccttacgccagccgggcaagaaaataggttccatcgttatgaatgccaacccttttactttggggcatcaatatttggtacggcaagcggcggcgcagtgcgattggttacatctatttttagtcaaagaagataactctcgttttccttatcaagatcgcctgcaactggtactgaacggcacaaaagatattgccaatttaaccgtgcacgccggttcggaatatatgatttcccgcgctactttcccctgctatttcataaaagatcagggggtggccgacgattgttataccgaaatcgatctgaaaatctttcgtcaatatttggctccggccttgggaataactcaccgctttgtcggcactgagccattttgcaccgtaaccgccaaatataaccgggatatgagttactggctggaaacccccgatttaccttatccgtccatcgagctggtggagatcgagcgcctgaaatatggcgcaaccgctatttctgcctcgtgggtacgcaaattactggcgcagggggataaggacaccattagcaagctggtacctgccgcgacctgccactacttacaacgactgctggctcagcctgcaaaagcgccggtcagcgcggtcaacaaatctgtatttcaattaggtgaataatgaaaattatccgagaagcggtcgccggcactttggagtcgagcgatgtcatggtgcgaattgccccccacgatctgccagaagtggatttgctgatcaacagcagtgtggagaaacagttcggagaagccattcgcgccagcgtattggcattactggatcaactgggattaacccaggtgcaagtgattattgacgataaaggggcgttggattgcgtacttcgcgcccgtttggagacagccttgctaagagcctgtgacctgccgcacctgccctggagccaaaaatcatgaaaccagagatgaagcaaagaatgcgtcgcagcatgctgtttgttcccggcgccaatgcggcgatggtcagtaatgcttttatttatcaggcagatgccatcatgttcgatctggaagattcggtgattctgcgggaaaaggatgcagcacgccgtttggtcttccatgccttacagcatcctttatatcaggaggttgaaaccattgttcgagtcaatgcgttggattcgctttacgggctggacgatctggaggcggtcgttcgcggtggcaccgatatcgtccgtttgccgaaaaccgatgatgcgcaagatgtgattgatatggaaagtgaaattgcacgtatcgaagcggagtgcggccgggaacccggcagtaccggtatgctggcggctatcgaatccgctcaggggattactcaggcgttggcgattgcccaatcttctcctcgtttgataggtattgctctgggcgctgaggattacgtgcgcaatttgcgtaccgaacgttccgcagaaggtgttgaactgttgtttgcccgctgctccattttgcaggcggcgcgagcggtgggaattcaggccttcgataccgtgtattccgatgccaataacgaagccggttttctacaagaagcggcgttaatcaaacagttgggttttgacggcaaatcactgattaaccctcgccaaatcgaattgctccataacctatatgccccgacacaaaaagaagtgcgccatgcgcaagcggtggtggacgccgctgaagcggcagaagccgaagggcggggtgtggtttcgctgaacggcaaaatggtggatagcccggtgattgaacgcgctagggcagtcttgcaacgagctgtgctttccggtttacgcgacgaataagagggaattaatcatgaaacgccaacaacgggttgatgccctaagtcaaaacccaaatctgaccgtcacgtcctatcgggaagcgtctaaagccaatttgcaggctcaaaaaccgagggatatcaagctgtgtagctcactggaaaaggcgattcgtcgctctggtttgcaggatggcatgaccatttcgttccaccatgcttttcgcgcgggcgatatgacattgaatctggtgatggatgccatcgctgcgatgggattcaaaaatctgacgctggcatccagttctctgagtgagtgccatgcgccgctggtggatcacatccgtaaaggtgtggttagccgcatttatacctcggggttacgtggcccactggcagaggccatttcgcgcgggttgctagcagaaccggtacaaattcattcccacggtgggcgggtcaatttgatcgaatccggcgagctggcgatcgacgtggctttcctcggtgttcctgcctgcgacgcgttcggtaacgccaacggttacacaggcaatgcctgttgcggttcgctggggtacgccaaggtggatgccgattacgccggtaaagtggtgttattgacagaagttattgttccttatccacataatccagccagcataggccaggatcgggttgatctgatcgtacaggtggaacaggtaggggatgccgataagatcggcgcagatgctacccgtatgacctcgaatcctcgggaactgctgattgctcgccgtgcggcggaggtgatcgctggctccggctattttaacgatggcttttctgtgcaaaccggcaccggcggagcatcgctggcggtaagccgcttcctcgaggataaaatgcgccgccgcaatattaaggccggtttcgctcttggcggcatcacctccaccatggtggacctgcacgaaaaagggctgatcgaaaagctgctcgatgtgcagagtttcgatcgcatggccgcatcctcactggcgagaaatcccaatcacattgaaatcagcgctaatcaatatgccaatttcagctccaaaggcgcgtctgtcgatcggctggacgtggtgattttgagtgcgctggagatcgataccgattttaacgtcaatgtgttgaccggctctgacggtgtgctgcgcggagcctctggcgggcactgcgataccgccgcggctgcacggctggcgattatcgttgcgccattggttcgcgggcgtattcctacgctggttgatgctgtgaccacctgcgttacgccaggctccagcgtagatattttggttaccgatcatggtattgctgtcaatcctgcgcgccccgagctagccgagcgtttgcagcaggctgggctggaggtcgtcactattgattggttatatcaacgagcgttgctactcaccggtcaaccgaaagccattgcttacaccgacaaagtggtggcggtggtgcgctatcgcgacggcagcgttatcgacgttgtgcatcagattcaggaataagcgatggatatcttttcaccgggtttggcggcgaatcggaatatcagcctgccggagttattaactagccgggaggcacgctatgcccgccagcgagcatggctgatgcgttatggcactacgttgatttcactcaccgtggttgcccccggggcgttgaaagacagcccgttaactcgccgaatttttgggcgggcatggcaaacggtgacggagctgacgcggcaacaaggttgggaatccttggcgcaggaggctttcccgctaccgaccggttgtgaagggttaattgctctgaatcaacccgctgaagcggtaaaagatgcggcgctactgcttgagatgaagcacccgttggggcggctgtgggatatcgatgtgttagatagccacggacggattttgtcccgtggggatgtggggttggctccgcgtcgttgtctgttgtgcaaccgcccggccaacgtgtgtggtcgggagcgaacacattcagtggatgaattgttagttcaaatggagtggatgctcgatgccgctattgcctgttgataacgcattcccgctgacttttcagctacaggactatgccgatctggcctatttcgcgctattggctgaggtcaatctaacgccgaagccggggttggtggatcgctttaacaccggtgcgcataaggatatgaatctggatgatttctatcgcagcgccgaggctattgcaccttggttttctcgctttatcgagcaagggatagccactgagcacctgcagggagaggcggcattgtctgcgctgcgcccgctcggattagcctgcgaaaatgccatgttccaggctaccggtggggttaatacccataaaggtagtgtgttttccctcgggcttctgtgctgtgctctggggcgtttgtccgccagaggcgtggctatcagcgcagatgccgtttgccaggaagccgcccaactgtgctgcggactgacggaaagggaattacaacgcagaaatctgcaacaaactgcaggtcaacgtctgtttactcaacacggtctaacaggggccagaggagaggcagaatccggctttactaccgtattaacccacggattgccggtgtatcaacgcttgttaaatcaagggatagatcaggagtgcgccttgctggaaaccctgctgcaactgatggcggttaacggtgataccaatgtggtgtctcgtggcggcatggcggggctgtactggctgcaacatcaggctgcggagattctggctaacggtggcattaaaacgccattggcaaaggctcggctgcgcctgttcgatgcccaatgtatcgctcgaaatttgagtccgggaggaagtgccgatctgctgattttaacctggtttttggctcatattcccgatcgtccaccttacaaacacaataataacaatgctataggagtatctctatgttgaagtcacaagagaagatatggaaagcccttgctccctttattgttctagggatcttgttattaattcccacaccagaaggtatgccaccgcaagcctggcgctattttgctatttttgttgccatgattgtcgggatgattttagagccaattcctgcgacggcgataagctttatcgctgtgacggtctgcgtattatctgccgactgggtgctattctcgccggctgaagtggccgatagtagctttaaatccggtaaagaagcgctgaaatgggggctggccggtttctccagtaccacggtgtggttagttttcggtgcctttatcttcgccctcggctatgaggcaaccggattaggccgacgcattgctctgtatatggtcaaatttatggggaaacgcacgctgacgctgggttatgccatcgtcatcatcgatattctgctggcgccgttcacgccatcgaatacggcccgaaccggtggtacggtgtttccggtagtgaaaaacctaccgccgctgtttgattcattccccaacgatccgtcctcgcgccgtatcggcggttatttgatgtggatgatggttatcggcaccagtatcagttcttccatgtttgtaaccggtgcggcacctaacgttttaggcattgaatttgttggtaaaatagccggtgttcatattggctggatgcaatggttcctcgctttcctaccggtaggcttgattttgttgatcgtagctccgtggttatcttacgtgctgtacaaaccgggcgtgactaaaagcagcgaagtgtctacctgggccaataccgctttacaggaaatgggttcgctgacgcgtaaggaaatgacgttaataggattggtattgctgagtttgtgtttatgggtcttcggtgccaaggccattaatgcgacggcagtgtgcctgctggcggtttccctaatgctggcgttgcaggtggtgtcgtggaaggcgattacgcaatattcgagcgcctggaacacgctggtcaatctggcgacgttagttgttatggctagcgggctaactcgttccggttttattgattggtttgccgataccatgagcacgcatctggacggtttctcacccaaaatgaccgtggcggcgttagtgctggtgttctacttctcacattatctgtttgccagcctgtcggcacacaccgcaaccatgctgccggtcattctggcggtagggaaaggtttgttcggcgtacctatggatcatctgtcgatgttactggtgttatccatcggtattatgggtgtattaacgccttatgcgaccggccccggcgtgattatttacggctgcggctacgttaaatccaaagattactggcgattaggcggcattatggggctgttatatatctccatgctactgctggtaggctggccattaatgagtttgtggatgtaactcgcaaacagaaattacgggcgttggtgtgtatccagcgcccgtttggcgttcagacttgcattcagtgtttcattaagagtatttatgcgaactttaacgccttatagccatgttataaaagtggttatgtcggtgtcaaagcgcaaacttagtgctaaacgggtaattaatctttaaaacgcggcataaatcacggcatgtttattgtgaccatcctcctcagctactactataaaatcccttttggcgatttggtctgattatcctgtgaaccctgtttttattcggaactttgccttctcctccatcccggctgtcggcctaaatggtcaggcaccttatgagggattactggggaaatgtgattttgatgtccatgcctatcaggacaatctgtttgctgtatacggcattgcctttcctcccagcctgcaaaaggcggtcaccaagcggcgagcggagtatctggccgggcgctttgttgccaggcaggtactcaatatgcttggcccgagggactaccatttggaaaacggccccgaccgcgcgccctgctggccagacggcatccaaggcaccctgagccataatgacaaccgggtattgtgcgcggcacaaattattccgttacgcctttctgccggcggtagtggcatagggttagatgtagaaagctggattggttcggatcggattgacgaaatctggccgggcattattaacgatgcagagcaccatcaattacaacgtggacctctgccgtttaataaaatgctgacgctgacgttttctgccaaagaaagtctgtttaaagcgatttatccgcagttacgctgctattttgattttttggatgtgcgtctggtgggatgttcactggagtcaggccgctttgaactggagttattgcgagaactgagtccggaatttaaggcagggcgtcgttttcaaggctgttttaaattgatggaaactgacgtgcgtacttttgtggcctattaaccgcgattgtctcctctttttgcgcccgtgtttttcctcatgggttcaattaagccgaaaccttgtggtctcggcttttttaatgccaaaactaaatcgttaagctctatgggctgatataaactggactcagagtttctattcctgaagctccggtgtctctgcgtgggtacggcagaagatgaattaatgtctggcgtcattccgaaccctctgttttaaacgtttcacactggataataaatttacaaggacacaagtggtgttcatcctgtcactgcgatggggtagtctggtgttgttaatgaatgctgttagccaatctcattctagatttgactttttattgttataggtaatcatcgaaaaatcagcgatgtaactggaggttctccctaggttttcccttgaatgcttataataagttaacatacgtttttatctccctggctgctcaacaccttataaaatcgcggaaacaattaactctattgcgataattaaagtgtgtcggcattatcccgaaaagtatttcgtctaaaaattttcctatatagtgaaaatataaccttgatggatctgtaaaagatagagttgtgattaatataacgaacggacatgttcttcttgttgtttactttgtaagatttccctcgcaaagattgtaattcaaaatcatcactaattagaacgactttcttttttaatcgactgaatagttgatggatgttgttattgtttatcgtcatctctctttctggccaaaccaaagtgagtaaatcatccctatctattagctgaccgtttgacgcatgattaaccagtgcgataaataataaatactctttattcgttaactctacactacctttcaggctatacacaatcttttcatctgccactacaaaatacatcatggttaattcctcctgttagcccaaaaaaacgggtatggagaaacagtagagagttgcgataaaaagcgtcaggtaggatccgctaatcttatggataaaaatgctatggcatagcaaagtgtgacgccgtgcaaataatcaatgtggacttttctgccgtgattatagacacttttgttacgcgtttttgtcatggctttggtcccgctttgttacagaatgcttttaataagcggggttaccggtttggttagcgagaagagccagtaaaagacgcagtgacggcaatgtctgatgcaatatggacaattggtttcttctctgaatggcgggagtatgaaaagtatggctgaagcgcaaaatgatcccctgctgccgggatactcgtttaatgcccatctggtggcgggtttaacgccgattgaggccaacggttatctcgatttttttatcgaccgaccgctgggaatgaaaggttatattctcaatctcaccattcgcggtcagggggtggtgaaaaatcagggacgagaatttgtttgccgaccgggtgatattttgctgttcccgccaggagagattcatcactacggtcgtcatccggaggctcgcgaatggtatcaccagtgggtttactttcgtccgcgcgcctactggcatgaatggcttaactggccgtcaatatttgccaatacggggttctttcgcccggatgaagcgcaccagccgcatttcagcgacctgtttgggcaaatcattaacgccgggcaaggggaagggcgctattcggagctgctggcgataaatctgcttgagcaattgttactgcggcgcatggaagcgattaacgagtcgctccatccaccgatggataatcgggtacgcgaggcttgtcagtacatcagcgatcacctggcagacagcaattttgatatcgccagcgtcgcacagcatgtttgcttgtcgccgtcgcgtctgtcacatcttttccgccagcagttagggattagcgtcttaagctggcgcgaggaccaacgtatcagccaggcgaagctgcttttgagcaccacccggatgcctatcgccaccgtcggtcgcaatgttggttttgacgatcaactctatttctcgcgggtatttaaaaaatgcaccggggccagcccgagcgagttccgtgccggttgtgaagaaaaagtgaatgatgtagccgtcaagttgtcataattggtaacgaatcagacaattgacggcttgacggagtagcatagtgatcggcacgtaagaggttccaactttcaccataatgaaataagatcactaccgggcgtattttttgagttatcgagattttcaggagctaaggaagctaaaatggagaaaaaaatcactggatataccaccgttgatatatcccaatggcatcgtaaagaacattttgaggcatttcagtcagttgctcaatgtacctataaccagaccgttcagctggatattacggcctttttaaagaccgtaaagaaaaataagcacaagttttatccggcctttattcacattcttgcccgcctgatgaatgctcatccggagttccgtatggcaatgaaagacggtgagctggtgatatgggatagtgttcacccttgttacaccgttttccatgagcaaactgaaacgttttcatcgctctggagtgaataccacgacgatttccggcagtttctacacatatattcgcaagatgtggcgtgttacggtgaaaacctggcctatttccctaaagggtttattgagaatatgtttttcgtctcagccaatccctgggtgagtttcaccagttttgatttaaacgtggccaatatggacaacttcttcgcccccgttttcactatgggcaaatattatacgcaaggcgacaaggtgctgatgccgctggcgattcaggttcatcatgccgtttgtgatggcttccatgtcggcagaatgcttaatgaattacaacagtactgcgatgagtggcagggcggggcgtaatttttttaaggcagttattgctcctccttaaaattagaatgcccgcaatatatcgcaacaaaagtaattttgtaaggctacccttggttattgtttgttaatattgatgagcttcatatttttaccaaatataacgtaataagttgttgttgtaatgctttgctgctatttttttatatttctttagccagtgtaattagcttattatttaattaaacatagcgatattgagcttatcttattgatccttcttattcgattgaactaattgttcaataatatgaacaaatacatgtgcaaaaatagaacgcttgtcccctgtgtttacagagtttctctgtcatttcgaagattcagatattacttcattgctgcttttatcatcaggtaagtgtgggtgagtagagtgattatcttcataaatgactaaatccaatagacgcagatttatattaatcttgagcctgcgtcattctgacgttaactgcggcttagcatcaataatagagagtaatataattcttatattgctattcaagctgattataaagtatttaattttacacatataattaattaagttgcttatagatggtgaggttggtttgttgtctttatgtaattaatcacaaaaataaaattcaattactaagtatcaaaaaactataaatatcgattagattatgttcgttagctcaaatcaacgggcttgaggttacctggatgaataaaatggatgttcaatgaaaaccttcagttagacaaaataaattctttgttctttgtatttaaaacaccaacggaatccgttaatggcagcgagcaggatttatatttttgctgcttttatctgctttctcagcatccaagatctatttatcacgaatggggagggctatgaaaaattatcaggaaaaaggctggtgacggccagattaaagggacgaggccgtaatggcgaatgatcctcagtggtttaaacagtacggaaatcagaaaaacacgattgttcgctggcccgtaaggccgtgaagaacaggatggggaggggatatgacgttaaagattccgactgatacacaggcaattacctggttaattattggccttttttcagcttggggaggtgttgtgagatatctcatggatatgcaagggcacagggggagttggagttggatgggaataataagtcagatcattatttcaagcttcactggccttttggggggattactcagctttgaaaatggcagtagtcattacatgacttttgctattgcaggcttatttggcaccttggggagtacggcgttgagttacctgtggcggcgtttcttggggagtccggagaaaaatcgtgggtaactttacttttagtcaaatcagtcaacgcaatctacaaggcatacacccggatctcgttcgggtggtgtacctggcactcaaattgtccgaggtggattttcgcgttatcgaagggctgcgtgatagcgcacgtcaacggcaaatggtgcttaatggcaagagccaaacgctcaatagccggcatcttaccggtcatgcggtcgatttggcgccttggttcaacaacacgattccctggaacgattggggagcgtttgctcaggttgcagcggcgatgaaacaggcggcgaagcaactacaaattcctgtgatctggggcggtgactggacgacgcttaaggatgggccgcactttgagttgccgaggatgcagtatccatgagtctgctcagtgttttgaaacgtggtctgctacttgccacgctatttgcggttttggttggcgggctgtgggttgctcaactgaaaaagaccgcgacattactgaattctgaaaatatcagtctgacgcagcagaatcagctttatctgcaacggttgcaaggatatgaccagcagatgaaaacactggatgaggcgttaaccactaatgccataactcagcgtcaggcagaggagaaatatcatgcgatcgaacaacaaatgcggcggctgctggctaatagccgctgcgctcgggagcctgtgcctgatgctgttatccggttgcagcaacgagcacttggccaaagcctgcccggtgcagccaatagtaccgaaagcgctgctattgccccatgatcccccgttatttaacgtcacaaagtggggggactatcccggttatgtggaagaattaaatctatcgttggcgcgttgtaatgcagataaaacggcggtggcccaaataatgtctccccaaaaaggataaatctctcttttagtcaattcagacaagggcattgactctataagattggcaaacatggatttaccgattttgtactcaatatcgaggcgctgccgtaagcatgcctggcaaaagcaggataataggttattggttgcgaaagaaacacggcggttaggggcgctcttcgctaggatgacagtcaagcttactgcaaaaagaaatctatgctggcacaaatccgatggcaaaaagtaggcgcgttatgtttcgctcttggtgggctgcaatatatttttgctttcttttttcttatcagaacaaggtttcatcaaatcgcttgaaagagtacttaacataagttatcgagagcgtgtatatagtattatatatgataacttacacgcggggtgtaacttaaataaggctgcagacttattaggtataagttctgcaaccttaaaacgtaagttgcaaatggagaatacaacattcacagcaatattattagatgtaagaatgaaccatgctttaagtttattaagaaattcatctctttcaatttcacaagtgtcttataaaagtgggttttattctgtatcgaatttttgttcaaaatttaaacgatattttggtttgtcaccaaagcaagtttcgaagaaattaaccaagaacattaaacttgaagttttgaagttttgaagttttgaagttttgacatccttcctgccctaaatgatagggattcctactgcgttcaggctatcacctgaattatttcggtgggtttactagaggcgagaacagagatgcttaaactgaaagcgcagcctaaacttgctgaggaagaacgagatattctgaaaaaggtagcgcggtactttgcaagagagccagactaaggtaccgcttcatcaacgatcaccaagatgtctggtcgatcgcagctacgcgcacctggcaaggctggctctacatgttcgtggtcatcgatcttttctttgcgtgtaatttggtaggttgctcaatgaaaccgacgctgtcacgtgaacttgcactggacgtattgctgatggccgtctggcggcgtatacctgcggaaagcgtcattttacacaggatcccagaactgtcagtatggtagcgatgactggcaacggttcagctgggacaataaccggatccgagtataagtcgacgtggcagctgctgggataattgctgtggtagaattgttcttcagcccctaaaaaaagaacgtatcagaaatcgaatctctaaaaccagagacatggcccaggcggatagcttcgattatatcgaattgttctacaaccttaccgacgccaccgtcatgtcgagagcttttaataactttcattagtgctcagaaaagcaagataatactttatttcaaactcttaaagtgtttcaccacaggccagttgttcagcgatgcatttaggtgtattcccttggcctgtccacgtccttttctcacctttttcatcgagatactcatatttttacgggctccggggcttcctatatttatgggtaatgccaacgccagcaaccaatgctaacgggtcagttccgtcttaactgtgtctgaaagtatggggatatgctgtcaatggagaactcaatacctagattgcgggtattacctaaggcttctttcagccagttgcgcgcggtgtcgtcggagatctcccatactggttccgtcccatagcgtgtgaaggtcgctaagtggtcgcgccgccgtcgtgaaaactggcatcgagcagaggtatcgttcttttcacaggcgtatctttgccgtgcggccgggtttaccggccgtatgatttttctgtttcaaatagcgcaggctttcggtataaccgatgaaaagcaaaaaacccgactaagtttccttaatcgggcttctctaatatggctcctctgactggactcgaaccagtgacatacggattaacagtccgccgttctaccgactgaactacagaggaatcgtgtgaacggggcgcataatatccagaggcacctgaactgtcaacgctaaattcagtagaaatgcgcgtttgctcagcatctgagcaaaaaatgcagattcggttggaaaaacaaatgctagcgttgaaaaattcgtcaatatattgaaatcagatgaaaaattaccgttagctctctgtcagctggctttcccatcttttcagacgggcgagggggtcttgcaaataaaaccgacagaaatggtgataaactgccgggaagcgtgaggctaaaagctccggcgcgctaaagaaatattctgaaagcacagcgaaacattccgccggatcgctagcggcataggcatccatactggctccctcaacgccgaccatatcaatctcgtcctgaatattatccattgcgcggtgtaaatcgaattcccacgccgcgacgtcacgcatgggaatgggagggacgccgttggaattaccgccgttgcgcatatccaatttgtgagccgcctcgtgaatcaccagattaaagccggagagatcgaaagaatcttgaatatcctgccagtttaaaacaatcggcccctgttcccagctttgtcccgactgcaccgtttggccgctgtgcaccagccccagatcatcctgccagtcgtcttctacgataaatggggcagggtagatcaggacttcgtgaaaaccatctaaccaccgcgcaccgagttccatcaccggcagagcaaataacagcgccaaacgagcctgcatcagtgcggttaactccaagccctgcaaaggtaccatgcgtttctgctgtaaaatctggctggcgacggtgactaaccgttgctgctccgcttcatccaatggagaaagtaaaggaatagccagtgcttcatgccattgcatcagcacttccgcttgcggttgatttgctttccacagccacttcatcatcgtgtcgctcgcaatgtgatttcttgggtaccaaggcaggatgttgtaaacatgccgtaaaaaagagcatgatggcaactataagcacggagagatgccggagcggctgaacgggacggtctcgaaaaccgttgagggggaaacccctccgagggttcaaatccctctctctccgccactattcaatcagttaggcgagattttttcagcgacccgcatcacagttagtctattgtcgatatgtcgggctgccatatttatgggcgacttcacttttttattcggtcaataggtgtccaaaatcagtgaaatattatttcactcgagcgcccggtaatcgcttatcctacgatgtaacacaaatggctagctgggctacgtgcttgggtagtaaaaatgatgagcggtgttttgtttataagtaaaatccaataggactacttagattatagtagactttgaattttcatataacctatagcgcgagccacgcggctacttaaatatggactaagagataattaacgcttgggggcgaataaaaagaatctctacaatagaaggcgtaggattcaaaaacggcgcggaagcgactaatgaaatcattcaatctggtatctaacctaccctcttacatactgatattttagaggaataattactcaggcgcttgacccggaaagcttactcagacagaaagcgcacttggctagatatgcccgcccattgctgctgatttgaaaaatctgctgtcggaagaataggtaaggaatatccagggctattcagaaaacgtttagcgcccaatctggaagtttctgtaaccgctatagaaaaaaagtctgctaacaggcggtgatataacttatcgctttaacctatggaatttaattgcttatatcacggtaacttactttaccttcaagtttcttggtctatctttgctaagctaaatagataaactaaaggagcataagaagatgcaaattccccctaaacctccgaatgagaacgctcgtattgcgacactgctcgcttataatattcttgatacttctcccgaagaacgttttgatcgaatcactcggctagcaaaacgcttatttaatgtccctattgccttgatatccttggttgatgttaaccgccagtggtttaaatccagcgtaggtctggccgagtcggaaacatcgcgagatatctcgttttgcggtcatgcgattttggaagaggggattttgatggtgcccgatgcgttaaccgatcagcgcttttgcgataatcccttggtgatcgatgcaccgggcattcgtttttatgcgggttgcccgttagtggtgccaaacggtagtaagctgggcactttgtgtctgattgatgtagagccgcgctctttggatgaaaccgatcagcagctattatgtgatctggcaaaaatggctgagcaagaaattgccgcggtacaattggctactattgacgagttgacgcagttgaccaatagacgcggtttcgaaatattggcacaacatgcgttaacttattgcgtacataataatattccggccagcgtcgtgttttttgatcttaataattttaaagcgatcaatgataattttggtcacgccgaaggtgataaagctttaatgactttcgcggacgaactgcaactattcttcagtgagactgacatcgttgcccgcttagggggagatgaatttgtggcgctactgacggcatctagctgcaaagatatggtggacatactcagtcgctttaaaattgccttagagcaaagaaatcgtcgtgaacgacgagggtatgatatctgtttcagcgtgggttatgctaactgcgattttgataagttcactacaataaaagcattactagctgttgcagattcttctatgtatacacataaactagagttacgcgataaacggaaatctcaacataagaactgagctaatgtttcggttttgctgtcatggtttgaatcaacaagagtgcaaatatcctttggaactacgttatcctatggcaatcgttggtctataaagataaaaacaactgacgtacgcacgaaatatttaaaatgaactaaataaggttaataaattagccagtatctctactagaaggcctcgcttgaacgaggctttgttgtttaataaacaggaatagttaatcccaccctattgcattattctcaatcaacaatagattactaatggcacttcggttatttccctcaaccggagggatgtatttagttatgtagatcatcggtcaacgatatcgatgagacactctaggcctatctatagcaaacaatttagctccatttcccagtttttttattcattgagatatttgcacggtatcgctcgaaaattagccagataggtcgtggcttaacttgatgaaaatgcatgcaaattaggtattaagatatacattattcatctatgttgtttaagattttacatgtaatattattttgaaccggccaatccagcaccgtatagcatagataagaatcgcaattaatttttaattaaggaatagcatcgaatgaagcagacattaagatattcgacaatagccctttcgttattcggtgctttaattttgaccggatgtagcccggataaaaagaacgataatcatataaaagttggtattagcgcaggtatcgatcagcctctttgggatgtggtcaaaaaaacggctaaagataaatacaatctcgatgtggaagtggtgacatttacggattatgtcttaccgaatgaagcgttaagcactggcgatatagatgctaattcattccagcaccggccttatctggatcgccagactgcggagcggggctataaattagcggttgttggtactacctttgtttatcctattgctggctattctaaaaaaataaaatcgctggctgaattgaaagataatgctcaggttgctgtaccgaatgatccaactaacctcggtcgtgcgctgctgttattacaaaaagttgagctgataaagctgaaagatggcgttggtttacttcctacctctctggacattactgaaaacccgaaaaaattgaaaatcgtcgagattgaggccgcgcagctcccgcgttcactggacgataaaaacgtggctcttgccgtaattaacactaattattcgagtcagattggcctaacgcctaagaaagacggtctgtttgtagaagataaagactcgccgtacgtcaatattattgtcgctcgtgaagataataaagacagcgagaaaatcaaaaatctggttaaagcttatcaaaccaatgaagtcgtggccgcagcagataaaatttaccatggcgatgcagtgaaggcctggtaataatttaaggtgaaaagtctggctgctttagtcagtaactaaaaatagtattataaaaagaaaagcactcacccattattaggtgagtgcttttttactacatgtgttttttagcgaatgacaaaatgtcttgtttgaggtcggttacttttttctctggagatttcttgcaaacttcaacgactttcggtgtgactagcgtgtcagtttcctggaaatctacatagtcaccttgcttatattccgtggtgtcatttaacacccaaaatacaactggggtgtaagatttaggatttaagtcaaggaactctttacaagtcatatctgcgggagtcgttgctgcgaaggtggttgcagcagcggagagtaataggcttgtcagtgcgatttttttaaatgaattattaaacatactgttttcctttttatctctaccttgccaaggacaatttatatttacgctaaaaaacccttgttagcaggagtattctgaacccaaataagttcattggtcaatatcagaaaggaaattctatatatattgatgatgacaggtaatcatcaataggccaaggtgattttaaataaaataaattagttaataatcaataatttaaataggttcatggtcatattccatgtatggattgtttttcttatctgtaaacttttgtttaaattgtaaatcatagattacacgaaattctaaaggggggctattttaaccatttaaatttggcaatattattttgcattttgcattttgcattttgcattttgcattggcttttaaattaaatataagaccagaatgaattggatagttgaaattattaatatgttagcgaagatgcaacaattgcatcaccttaatagtaaggaggttacagaagccggctataaataacaaagcatgtcattatctaacatggggcaaattcattaataaaaaataatatacattcgcattttaaatatattagtgaatcatgttgttgtaatcacagttctcaaccatactcctcgtgataaagtttattatgagtggagcgggggaatgataacgataaagcggaagctaagcttatctgcaatgatattaacatttatcggcagtgctataactatcccaaaagtagtggcggaagaagtgggatatacgctggaaaaagtggtgatattgagccgccatggcgtgcgatcgccaactaagcaaacggaattgatgaatgaggtcacgcccgataaatggcccgaatggccggtcaaagctgggtatcttacgccaagaggtgagcagctagttaagataatgggacacttctacggacaatatttccgtcataccggattattgccgaaggaaagatgcccggctgaggggcaggtttacgtttattcagatattgaccagcgtactttattaactggtcaggcgttaatagacggaattgctccccagtgtggatttaaaatatttcatcagaagaacttaaagcagatcgatcccttgtttcatcccgttgaggctggtatctgcgctttaaatgcaaaaaaaacgcaggaagcaatagaaaagaagcttggcgcacctatcacgacattaagtcaacgttatgctaaatccctggccttaatggggaaggtactcaatttttctgcttccccatattgtcagaaaatggaaaagcaagggatggattgtaattttgccgatctatcacctaacgaagttcaggtaaatcaggaaggcagcaaggcttcattgagtggcccggttgctttgtcttctacgctggctgaaatatttctgctacaaaactcgcagggtatgccgatagtggcctggcatcgtttgctgacgagagaggattggcagactctgatgcttttgcataactcgcaattcgatctcatggccaaaactccttatatagcacagcataaaggaactcctttattacaacagataaatgtggcgcttttacagcctgagcagggaaaggctgggctagataaacagcccgcgactaaaaaaacgctaagcaatactcaattacccgataacaatgcggtatttattctaggtggccacgataccaatattgcaaatgttgccggaatgctgggtttaaattggacattaccgctgcagccggataatacccctccgggaggtggattagtttttgaacgttggcgagatcagcatggacaaagcttcgtggcgattaaaatgttctaccaaacgctaaatcagctgagaaatatggagaagttggatttgtcgattaacccagccggaatggttagcatcgatattcctggttgcgaaaatgaaggtgaaaataaactgtgccgcttagcgacgttccagaagaaagtcgtcgaggctattgagccggcctgtaatctgccataagtgatagcggcgtaataaaccaataaggccactgtaatgcaggcggccttattggtggttacgagagtaaagtcagatgagagattgaaatcttattaaggacgttattggccaagacgaactagatcaaaaggcacataacgttcgcaggcgtgttgtaactcaacacactgagcgcgctcggcctcaatatcagagagtccatcagcatgtattgccttcgcaacatcaatcaaacctgactgtgcgaccataacgcgatgcccagggcgaatttggtttctatttctgtcatagactttaaccatattgacctccagttaatcctgtcaatttgcggctataggctacttatcacgcccctaatttctttgcctcagatcaaaaatatttaattttttatagctgagttttatctactgacccaacagcgaatggatatgcaaccagaaaggaaaggtctgactgccggattgctattaaaaaagctttatagaaggtaacaaggattgcagagcataagcacaacgagtttaaatcaggtttggtacgtatgagtcattggattagggtgttcagtgatgactttcggttattaaccatctcgacttatggtctgacttaacaaaaatgtatagttcaaatgactgatttttatctgtaaacaaacttatatgctattagtgtgatatattagcttgctatttatgagccgtactggtttaatgcgtcatcggtttggaacacagaccttatgaaagcagttttagtaaagcagttcacagtattagcgttatcctcaatagatacctcttcaccgcgaaactccttcttaagtgccccataagaaataactgaaagacagacctctcttgccttatggcagcttaaataaatgaaggaagtatcgctatgtctaataaaatgactggtttagtaaaatggtttgacgcgggtaaaggctttggttttattaccccagcggacggtggcaaagatgtattcgtgcatttctctgctatccagagcaacgattttaaaacgctggatgaaggtcagcgcgtagagttctcgattgagaacggcgcaaaagggccttcggcggccaatgttgttgccctgtaaagacaggcaataacggctaattatcaggttagaaatccccggtttttgctctgatatgaattgcccaaataaagaacgctttgcgcgagataccaagtttggagatccttagatcgatccttaaactacggtactatgacggctcctatgactaggagccgtttttttgtgctatttttcaggttagtgacaactttcattgctacggtattcttcgtaaaaatcattccactgaattaatttatcacagcctgtttaagcacgttagaattcgcagggctaatctcaaagagaatagagcaaacagcgacgtgggaatttttataaagaaacgccctcgtctatcaagactgagggcggcaaagacttctattcgaaaaaaccagcgccattccagttaatcgagctgaagggattggataagcgaaatagctagatcaatcgttggccagtgagcgcttcaagaattttcaacggggactgctctgggtgtttcataccctttaccggtaataggaaggtctgttccagcatatattggcctcccattgcggcatgtggtgtttgatctgaaaaacaaatccaactgctaccaggcggaaattcgatcgcaacttgttggccattttgctgataatctgcgtcagatttcattttatcgtgtagctgcaacattaaatgatcgtaatggctgcgtcggagtttggtgataccaactttatgctgtaaccaactgctaataggtgagtagcgatcgagttttggcagataacggctcgctaattgctgaaaatcttcacctactcgccaagagcgattttcaccgtggggattaatattggtgaaaatacgaataatccgctcaccgtaattaggcctcgaggggaaagcatcaacgtgtaaacggctatcatctttgcgccaggacgttttgtcccgccatgcggcgactggatgcagccttaggctgttagttgggctgcgtagggcatgggtatattcaggtaataattgtcctaatagactaacgcagtgttgataatagcgctcaagcagctggcgcgttagctcgattttactttcatccgtcacaccagtaagttcaccttccagaggtttgaaactgatgtttttgcgttttatatcgaccagcgctgggttcagtaattgcttctcttgtgagcttaacgggaaagccagattcggtaaaaaaagaacttttccctgttctaaggcttcaattgcatcgggaatgacatgctcattcttgccccaatgttggtgagggagagtgagaatcatcggatctggggcgatagagttagaattcatcagatatccggcctagattattttagtcagtgataaataatataactttttttaaacaattaattgcacttttgtggcgaattgcgagcaaacagaacattccggttagtggcagagcaagtaatggagtggcacttatgcagagtgtcccattaggtgattttggttctgaatattctgaggacaatgatgctcaatgagctgagcatcatggtgctagataaggttgttttagagaggatggcgatagacgacgtatcgtattcctttggctaagaaacgtagaaaaattgaattaatgtagtgaaatattaatatgttaactgaactgtgattggttctaataaatatggacataaaaaagccctgataatctgatcatcaaggctttttttatcaggtacatatcatctgattagacaggcacgattctcgagtcagtaatcgaggagacttgcttttttgagtaggccagatcgtaaacatcgtagaaatcgatttcgcctttattttctatgatgcgtttaattttatttttaaagtcatcattgatatttttattttcaagcaatttagccactgcttctggagacagagcgcggctgaaaaaccattcgccgttatagcaaacgcggaggtcgagtacaccaatgtcttcaaatttaaatatcggctttatttccatcaataaaattgctgacatgatgacaaaaaatgcagtaaaaccaataacgtaataagtaccaaaataaggtgttaaaagcatcagaattaaaacaaagaaatatgaaatcagcattgccaaacacaaatacggatgtttatgaatgaactcaatattaaagtcaagacgaccattccggttttcttttttattgattttctcaatgtcttcaatgagtatttcttttattatatccattgcgatgaccttgtaattgcagatgagtcggataaaattattatctattactatagattagcacgagaaatgcgtcctcaagtatatcagttcgatgaattacctgacctaactgttataggcagtttctgcgtatcgtgagtttttgaacactgttatcacctgctggtgacgacgtaattccctgctttactgagctaaaatttagtagagcgtagaacctgatgagattgaacgctctacttgttttatcaagcacggggtgactatttgaggttagaacgtgagtacaattttaccaatatgagtgctcgcttccattaactcatgtgcggcggtggcctccttgatagggaaggtcgcaaaaacctgtggttttagcttccctttctctatcaatggccaaatttttagttgtaactcttctgcaatgattgctttttctgccacggttcgtgaacgtagcgtcgagccggtatgtgtcaggcgttttaatagcatcggcatcaagttcagatctttagcaggaccattttgcgtacctatttgtacaattctgccattcatcgcagcggcttcataattgcgtgctacatagtcaccagcgatgagatcgacaatgacgtcggcaccgttgccttcagtggctaattttgtttcagccacaaaatcctgagtacggtagttaatcgctacatcggcgcccattgccaggcaagcttctcgcttatcttccgatccgacggtgacaattattttggctgcgccaaaagctttgcttagcatggttgaggttgtaccaatgcctgaggaaccaccgtgtatcagcacggtttctcctgcttttaagccgccgcgctgaaataaattagcccagacggtgaaaaaggtttcgggtaacgccgccgcctcgatcattgataatccttccggaaccgggagggcgtttgtttcgtgtatcacacaatattcagcataaccgccgcctgcgatcaggccgcaaactttgtcgcccatcttgaatcgggatgttttctgtcctaaggccacaacttcgcctgaaatttctaaacccggaatgtctgatgcgcccggtggtggggcatacaggccgcgacgttgcagaacatcgggccggttaacgccggcagccgcaactttgactaaaatttgcccttcatctggtgtagggatagggcgtttccctgccatcaagacggaaggtgggccaaattgggttatttctatcgcaaccatgcgactatcggaggttattgaagacatatcattcctctttagttatggcgaactcattgagtagccaatggcttctgatttacagaaaaggttaatagtttaataaacccctctgagtgctgaccatattatcctcattgtgagaataatccattcgtagagtgcgagtcagatgtgaaaagtaaggtacgacagaaagtaataaataaaaaaggcgcccaatagggtgggcgcataaaagtgctaaaaatgaataactacaggactaagagatactctggatcattttaattgtatgggtaaacccataggccgttatataggtataaatcctaaaccttgctccataaaaaagccggcttagtttacttaattatttgaactgccagcagacttggtaatgatagttttctgcattcagtaggaaatcatcattgacactgggactccaagaatcgtccccaccaacgcccatgtggtaaccatcgatgtttaaccaagtccctttttcatgtttcagcagatgttgatgtgatgtttccatcaattgttgcaagccgtagcgactaatcccgaaatggaagttacctgttagttgtaaattgccatagcttaaactgcgggtgttacaacgcaggccattctcactagggaacgtatagggagtgtgtagcgattcaagaggcaaagtccattggctgaaagtcgcagatagttggcgatctggataattttcatgtggacccagcccaagccaacttacttgcgattcgataagattcagttggcagcacatgcctatccgggctggagatggtgagcctgaggcccgcgtaacattgacttcaattttcatctgattttgttcattgaaatgatagacccaacggctttttaataaacctccttgaggagcgttatactcataatctgcggttatcaatacgccattagacattgtgctggcatgtattgagatacaacggcgatcaagttgatacattccggcctgtttccagcgctcaacccaggcatttggatcaatccgcgtcgtttcgctgataccaatatcattatctaatggagcgcgaataaactgatcctgaagcggagtaagtaaaagcggtttttcattaattaaccactgttctaataaaccactttgtcgatcgaataaccaacgctgacgattattttcaacaatccaatattgctcattagatgtaagttgaggatgtccaatcacggagatattttgcttcgatgcggtgttcgatgcgtgggttaatgaaggcagaatggtaggtaatttccattggtgccacgctgacttgtggtcttcttcagaccactgggtagcggttggttgtttaatctcaacgtgtagccacaattcaccttgtaactttaggggagctggtaatgatcctaactctagcttttggcttagctctggggcgataacaataggtatatttccatgctgaattatttctccatccagttctagtcgccagtaaaaatgttcattgtcagtatgacggaatagaaattcactggttacttccactatgagtggggtggtgctgacaagcgtaaattgaaagaactgctgcgctcgctgtgcttcataaaggctaggatggggagttctatcagggaaaaccaatccgttcatacaaaattggcggtcgttaggagtatcaccaaaatcgccaccgtaggcccagtaggcttgcccgttttcatcatggcgagtcagactttgatcaacccaatcccaaacgaaccccccttgtaagcgtggatgctgccggaaggcctgccagtaacgatcaaaaccaccaaaactattccccatcgcgtgcgcatattcacaaagaattaatggccggggctcttcgggtagaccaatccatttttttatcgaccacttaggcacggcatcaaaaggttggtcttgatccactctggcatacatcggacagagaatatcggtagcggcagtattggctccgccaccttcatattgaacaggacgggttggatcgttagttttgatccagcgatatagcgcatcgtgagttgcgccatggcctgactcattaccaagggaccagatgataatgcaggtatgattacggtctcgttgtaccatccgagtgacgcgttcactgaatgcattgagccaacgtggatcgtcagacagtcggctcatcggttgcatcccgtgagtttcaatattagcctcatcgaccacataaaggcccagttggtcgcataaacgataccacagcgggtgatttgggtaatgagagcagcgaacggcattgaaattatgccgtttcattaactgaatatcctgacgcatagtagcttcatctatggtctggcctgtcagcggatgatgctcatgacgattgactccccggataagcaagggtttgccgtttagtttgagtagccctttatcaatttcgattttcctaaaacctatgtcataagcttccgcctcaatgatttcttgatccaaagacttgagagcaacaacaacgcgataaagtgtaggttgttctgcgctccataagtggggcgattctaccggtagtaccaattcgacacgttccggatagttacctcgttcatcaattgttttgctccccatgtcctgttcttgctgcccaatcagaacatcatttagccaaagctgagcctttatcaaataattgtcggcaatatgaggttgcaatagaggcaaattgatcgccgccataacggagagctccgcggagcgaaaaccaggtgccagtagtgtcttaatctggatattagacagatggatatctggtttatgcagcaacgtcacgtcgcggaaaatcccgctcatacgccacatgtcctgatcttcaagatagctgccatcactccagcgcaagaccaacacggcaatgcggttacttccggtttgaagatagggactaatatcgaattcagcaggcaggcggctgtcttgcgaatatccaacccagttgccgttacaccacaggtgaaaagccgagtttacaccgtcgaaaatgatgcgggtttgaccggatgctggccagtcgggattgagcatgaattcagttgaataacagcccgtgggatttaagtcaggtacatagggtggattaacaggtatcggatattggacgttagtataaataggtgtatcaaaaccaaataactgccaatttgaaggtacaggtaaaagagttgatttaggtaagtcctgagtaatccaatcctcgggaacggcctcagggcggtcaaaataactgaaatgccaatatccatttagagaatgcagacttgccgaatcggtatcatcacgagcctgagtaacatcacgccagctgcgaaagggagaatgtgcatccagtcgattatattgagtgatacctgggttttcccagtcacgtcgagacagtatatttgccagtgatttctctcgattaccttgccttatctctgcattcattttcagccttctttttccgtttgattatcggggcttgcatttagtcgataggcgacactgaatcgcataaatatagccacacaaatgttatgcgctcacatttcttgttttgcttaccttgaaggggaaggaatcgcttgtaaacgggtaaaaaatgaataagcgagtgagatcgcatttatttttggttatgcaaaaaatcgtaaaattttttccgagaaggttcgtaaaatttatttatggctgatgatatgtgtgccaataacacgtaattttatttcgaactacaaggtacccagacgattcgctatttgtgttccgcaagctcttgtggtgtagtttgtgacatgattggaacgttatttactggggctgttgtttgacgaagcacaagttcagggcttaaaagcagagagtttagctggatgccatggctagttcgcagtaacgcgaccaattgttgcaggcttttctcgcctagctgacgaaaatcttgtctgacggtcgttaaaggggggtgaaaataggcactatcgtcggtgtcgtcgtatccaactatggaaacatcttttggaatgctgagaccttgttcctggagggcgcgtaaaacccccaaagccatctggtcactggcaaccagaatagcggtaaaagaggtgccgctttgtaaaagggattttgcgcaaagatagccactgtgtgcgctccagtctccatagaacactttctgaggctttaggccgctcaaggctaatgtggttaaccagccttgatagcgcagttgggaggaaattgtgtctttagagcctgcgatcagaactattttctgatgccctaacgccaataaatgttcggcaccttgcctggcgccatgaaacgggtcaaaaaccacgctatgagcggttgattgcggatcaacgtccagaaatatgacgggaacattggtgcattgatgggttatttctgcgctttgctgctgagttagtggcgcattgattaatatcccctcaactcgctgagccaggagttcattcacagcgcgctggcaggcctgctcgtcaaaatgatcaatcatggcgatgacgacgctaaaacctaattggcgggcttttatctttattgcagaggcaatctgcgatggcgcatgtaaagataaatcggttgtgactaacccaagtgtacagctgttcttaccagccagctgttgggcaacgcgattgggtacatagtgcagtgctgccattgcctgttctattttagctctggttttgtctgagacattcggagcctgatttaatacgcgagaaacagtctgataggatacacccgcgtaatgtgcgacatcatcgagcgttacggatttggttttcataaacagcttctcagcaacagaacttactgaacataatagcaaaattgtggcataaatttttgaacgcagcagtaaaaggttaaaatcgcctgccagaagccagaagccagaagccagaagccagaagccagaagccagaagccagaagccagaagccagaagccagaagccagaagccagaagccagaagccagaagccagaagccagaagccagaagccagaagccagaagccagaagccagaagccagaagccagaagccagaagccagaagccagaagccagaagccagaagccagaagccagaagccagaagccagaagccagaagccagaagccagaagccagaagccagaagccagaagccagaagccagaagccagaagccagaagccagaagccagaagccagaagccagaagccagaagccaggttttattttgtcggctcactgagctttatagataacacttatttaaaaaatcattcgcaacgaaattggcgtagggctaaaacctgcagagttaatgcaattttatagataagctggtttaactgatggcgttgatagctaaaagcatgggttagggtgaaaagcgtcaagcatcagcatcaagcatctgcgccaatgccggataatcaggcgtagtggtatttaatgaaatggttctggcgacaggttgtggccgggggaagtgaataaaaaatggcttctttgccttaattttaggcatgtgaatcacaatattcggttcctgtaataaaaagagttgctattaaaagcccgtcatgagttaatgcgtctcggcctgtggtacagacctatttatgcacgacatcttgagtaaagtagttcatatttaaagcgttatcgttgatagctcttcactgacgaatttccttcatagtgcctccataagtaacgactgataaccggctataacacgcccatggtggcaaaaattttttaattaaggaaataaacatgtctaacatgatgaaaggtcaagtaaagtggttcaacgagtctaaaggcttcggtttcatcactccagctgacggcagcaaagacgtgttcgtacacttctctgcaatccaagatcaaggcttcaagaccctggctgaaggccagaacgtacagttctctatcgagaacggtgctaaaggtccgtctgcagcaaacgtaactgcaatctaatcggcctctcgctgattaattgaaaaaacccgctcaggcgggttttttgttatctgtaataggccatgactcaagttttacgttccgtttgcaacatcccgttcttcctccagacaatctatcctcgaaagctacctatcagcgcttccttatttaaaatactacctatcggtaattaccgttgcataccactctggtacgcgtaaaccttatcattctcactgtattatgtactacactagctgcattgattaaggataggataagactatgaaagttaacgatctagtgacagttaaaaccgacggcggcccgagacgggaaggcgtggttcttgaggttgaggaattcagtgagggcgtaatgtatctggtttcactgaaggattatcctgagggagtttggttcttcaacgaaattgatagcaaagacgggactttcgtggaaccgcgttgaattgattaagcctatatacaagaaaccggagtaggggattccctgtctccggtttttttacatcaatgttagcctgctaccggctaacacattgaatatccgatatatagagagttaatcggcatgagtaactcgcttaaaatgtttcccagttttccgtatccagttctggttttttagcattaaaattattgcttgtcttggcgttacttgcgggttgtccacccgtgtttttacctttgctatttaattggaaaacagccactgcgtgagtcagcattgatgcctgctgctctagtgatgccgccgccgctgacgcttcctgcactaaagaggcattttgctgcgtgacattatccatttcagaaactgcctgagctacctgactaatgccccgactttgttcatcggatgcagaggcaatttcacccataatatccgtaacatgagtgaccgcagttacaatctctttcatcgctttgcctgcgtcagaaaccaaaatcgaaccgtcgccgaccagatcaacggaagcttcaatcagacattctatttctttggccgcgtccgcactacgttgagccaagtgacgaacttcactagcgacaaccgcaaatccacgtccctgctctcctgctcgggcggcttcgacagccgcgtttagcgccagaatattggtctggaatgctatgctattgataacattggtaatatctgcgattttcattgagctaagggatattttatccatcgtgctcacgacatcgctgacaatatcaccgccttcacgagctttgctggaggcattggctgccagttggctggcatgatgagcgttttcagagttttgttttaccgtggcggttagctgttccatgctggcggcagtttgttccaaagatgcggcctgttgctctgttcgtgctgataggtcggtatttccagacgctatttcactggtcccttgatagatagaatctgcgctatttctgacagattcaacggttcgggataatgattcctgcatcagctgaatgttgctgccgagtaggccaatttcatttttgccgaatggaatagtcggttgagtcaggtcgccatcggcaatccgttggatgcgggtgaccagcacattcatgggcttgatgataactttactaatgactaaaaaagtcaccaaagtaagaaccacggtgaaaatgaaggctccgcccatcaagatataacctaaccgagccccttgtttagccgattgatttatctgattggcttgctcggcaagataattaatgctggcgagcaaaggttcgttataggccatatctaactgtttaagcttttccgcttcgagagaaataacttcctcaaagtgcccctgttgtgaggcatccaacatcggcatcatcccttcgctgcgatattgttcgtaagctttcttaagcggtatatccagagctaactcatttttatctttacctgggcgattgaagtaaagatcaaacatcttttgcgattcagccagacgattctccgccgtttttaaaccggattgataactttccgtgtcgccaatgcgtgcggcagaagcggcctgaatcaaaattaagcgtgccgctcggagataatctgagctgttggataaacctagacgaatgtccacctctttagtagcgtgctcaagatactgattactttgttttaagaagtagctagatgtgccaatggccacggcaaacagtgccagtatgccagccagaattgccacaaacagagtaaccaggcggatattattaataaatatgacttttgcctgcgaaggcgtggctgtatctattaattgctgtgtacttccacttttcattattatttccgtcttaaaggcgatcgaagggagaggtaggaaccggacagaactttattcacattggtaattaactacataaactgcatagagtacttttaaaacctatcggccattgacccgaaatgcttagggttatatatgcgacagagatcgcaaaactgattaaatacgttcataaaactaaagaatggagcctataaggccgataaagctgcaaatttaccaagggatttatcagaaaaactggattggcttaatacagtatcgcggtaacttgctgtttttcatcttccttgccttcctcacgctctggttgaatggcccgagcgaagtacgatagctaatgcaatagcgctcctacgaatgaaagaactgctggtggctgtgaacttatgcttgagtaagggaacatcagctctaaaatgctgacaacccgacaacccgacaacccgacaacccgacaacccgacaacccgacaacccgacaacccgacaacccgacaacctgacaacctgacaacctgacaacctgacaacctgacaacccgacagattgaattctttatacagattgagttacagggagcggtagggataaacacgattatctttgcgaaggataagatacgcgaagcgatgcaatgtctcatacagggcttgggcttttgttaatctttctgagttagccgtcactgaaacgagtaaattcgtgataggggagctaaaaatgttttggttccctgcgcgggagagcaaaaatcaggtgcgctgtggcattacggaaactcataagccggcttaattgaacgccagaagattattttttccttgagcaataaattcaatgataagaatattttccttttttaagcgaaatacacttaattatcaacgtaaacgaagtttttaattatatttcctaatgaattattgtcgtttatgatttgttgaaaaaacctcgctttacatatttattccccgaacctataattatgcgaaatttcagtggagagaattaatggacacccaaagttgtagtcaaataagcaaggcaagctgactcatctccttctgatttgttgcttgccgaacatggcgggcagcaccctcaagttttattctgaactgtgcataccctagtgaattataaatagtcgatggttttatcatcgaaagagtttatttggattttattatggtattcaacggtcactctctatttcctcctggttttcacatcagttaattgctgagtattctctcggcacaattacctgtgtgctaaatagcacatgattactcttccattaataatgtggatagaatcatgtcattgactccgttcgtcttaaatatattactcgctacggctttgggcgcattaattggcgctgagcgtcaatggcgtcagcgtatggcgggattacgcacttatgctttggttgctacaggcgctgcgatatttgttcttagctctgccgtaacatctccggatagtccggggcgaattgccgcacaaattgtttctgggatcggttttttgggcgccggtgttattatgcgcgacggcatgaatattcgcggtttgaacacggcggcgactctgtggtgttccgctgcggtgggcgttctttgcggacttgggcttgtctggcatgcggtgtgtgcgactgcgattattttgagcgctaatatattactgcgcgaagctgctcatcgaattaatctacagccccaacaacaggctctcgatctggaagttcgttatcgtattcaggtaacctgcggcactgaagatgaaatattggtgagaacattaatattgcagggattgaatggaatggcactgcgtttgcaatctttatgtagcgcagatatttctcgtcccggtcaattagaagtgtgtgccgaaataatggcaacgccagcggcgcaaaaagaaatagaaggcattgtttgtcgcgttagtctggaaagaagcgtcagcgcggttcattggcgagtggcatcagaattgcccatatgaaattttactgttatctggcaaaactattaatcataaataataaactattctcacccaagtggtagtaaggagccgttatggacgagcaccccggagttaaattaatcaagcgttgttaatttcgatttaaattaatctggttggcaacgcaataaataaatctcgacgtcagtttattctcaaaataattgggaggataaaccctgcgtgatgagtatgaaataaaaagagatgcgttatgaccaaattaatgaaaacagggcaagcggaaaattatcgccgtgaaaaaaacaaaccttttgtcgttgcacaagaggccaaaaatagtctggatttaaccttatccaaattgaatgccaatttaaatggtttaaccgaagaggatgcccaggaacgccttgagcaatatggcgcaaatgaagttgctcatgataaagccccacatgcgttgatacaactggtcgctgcttttaataatccgtttatttttgtcctaatggtactggcggcgatcagtttcttcactgattactggctgccgatgaaacaaggggaagaaaccgatcttaccggcgtatttattattgtgattatggtactgctgagcggatttttgcgattctggcaagaataccgtaccaataaagcggcagaagccttgaaatcgatggtaagaactaccgcaacggtaatgcgtcgtgaaaaacacagcgtgcagccggttaaaagggaagtgtcgattaaagaattggttccgggggatattatttatttgtctgctggagatatggttcctgctgatctcagattggtttcttcaagggatctgtttatcagtcaggcaattttgactggtgaagcaattcctatcgaaaaatacgatgcattaagctgtgtaagccaaaaatcaacctcctcggaggcctgtagtgaaagtgagctgctggaattatctaacgtttgtttgatgggaaccaacgtggcgagtggaacggcgaccgcggtggtcgtggctaccggagggcatacctattttggttcgctggcgaaatctatcgtaggaacgcgttctcaaaccgcatttgaccgtggcgtcaacagtgttagctggttattgatccgatttatgctggttatggttccgattgttttactgattaatggttttaccaaaggtgattggacggaagcggcattatttgccttagcggttgccgtgggcttaacgccagaaatgttgccaatgattgtcagctctaacctggcaaaaggcgcaatcgccatggccaaaagaaaagtggttgttaagcgactaaatgctatacaaaatttcggcgcgatggatgtgttgtgcaccgataaaaccggcacattgactcaggatcgtatcattctggaacatcatttagatgcgaaaggctgtaacgatactcgggtcctgcaactggcctggctcaatagctatcatcaaagcggtatgcggaatctgatggatcaggcggttatcagttttggccgcggtaaatcagttatcgatcctttgcgtagttacaataaagtcgatgaattacctttcgattttgtgcgtcgccgcttgtcgattgtggtgaaagataaggatcagcggcagcagttgatctgcaaaggtgcggtggaagaaatgctccaaatctgtagccatattcgcgatggcgatcagattttgccgatgaatgatgcgcgtcggcaggcattgctgacactagccagccaatataatcaggacggtttccgggttctgctgctagcaactcgggatatgggatcgcaggtcagcaatgttccactcagtattcacgatgaaaaagagctgattgtcgaaggggtgttgacgttcctcgatccgccaaaggaaagtgcggcggcggccattgctgcactgcgtgaaaatggcgtagcggtaaaagttttaaccggcgataacccgattatcaccagcaaaatttgtcgcgatgttggtttggaaccgggagaaccactcggtggcagcgatattgaattgatggatgctgaaacgctggcgcgtgaagtcgagttgcgcacggtattcaccaaactaacaccattacaaaaatctcgcgtattgaaaatgttgcaggccaacgggcatacggtcggtttcctcggcgatggtatcaatgatgctccggcgttgcgcgatgcagacgtgggaatttccgttgataccgcaaccgatatagcgaaagaatccgcggatatcattttgctggaaaaaaatctgatggtgctggaggagggcgtaatcaaagggcgagaaacctttggtaatatcatcaaatacctaaacatgaccgccagttccaacttcggcaatgtgttttccgtattggttgccagtgcttttattccttttttgccgatgttggcgattcatttactgctgcaaaatctgatgtacgatatttcccagctatcattgccttgggataaaatggataaagaatttttgcgcaaaccgcgtaagtgggatgcgaaaaacattggccgctttatgctatggattggcccaacctcgtctatttttgatattactacttacgcattaatgtggtttgtcttcgcggctaatagcgtagagcatcaggcgctattccagtctggctggtttattgaggggctactctcgcaaacattggttgtgcatatgttgcgcacgcaaaaaattccgtttatccaaagtactgctgcgttgccggttttattgatgaccggattggttatggcgattggtatttatattccgttctcacctcttggcgcgctggtcggtctgcagccgctgccgtggcaatatttcccgtggttagcgggtacattgattagttattgcgtggttgcgcaattgatgaagcgattctatatccgtcgctttggggagtggctgtaaattaaagattctgattaaacggcgtcgtacaattattcaccggggtcttctgaccccggttttattgtttattcgttgctcacgcgaataaccaacttaccaaagttcttaccttgtagcagacccataaaggcctgtggggcattctccaatccatcaactaaatcttcgcggaatttgatcttgccctgttcgagccattcgttcatctgtttgatgaattcgccgtagtgatgaccatagtcatcaaaaatgatgaacccctgcattctgatgcgtttacgtaaaatcagaccttgcaataacggcaggcgatctggcccgtcaggtaatgcggtggcgttatactgtgaaataatgccgcaaacaggaatacgtgcttgggtgtttagcagaggtaagaccgcatcgaatacggcaccgccgacgttttcgtagtaaatatctataccgtcagagcaggctttagctaattgctgaggaaaatcagtagattgatgatcaatgcagacgtcaaatcccagttcttctaccacatagcgacatttttctgtgccaccggcaatgccaactacacggcagcctttaattttcccaatttgtccaacaaccgaacctaccgcgccgctggcagccgccaccaccagtgtttcgccttcttttggctgacctatatccagtaatcccatataggcggtaaatccaggcatgcccaaaacaccaagtgagcgagaaggatgagacagtaatgggccaaggtttttcacattgctgccgtcagaaaccgcgtaatcctgccatccgttagcggacaatacccaatcaccgactttaaaatcaggatgttgcgaggcttcaacccgggaaaccgtgccgccaaccatcacgtcgtcaatggcaactggaggggcatatgatggggcatcgctcatgcgaccacgcatataaggatcgagagataaatagcgggttctcagcaagatctgtcctgccgctggctgagggatgtctatgatctctaaacgaaaattatccgctgtcggtgcgcctttgggtctggaggccagcacaatacgacggttatggattttatcttgaggcatgttgagttccttgctcgtttgacagatcggaatgaggtgtggctagcgcaaacctcgttaggtgctgcaaaaagaataatgggtattgcacaaaatgcctcaataaggcacagccgttatagcgggacgatcaggacatcaacgcggctggcattgattaatcgggttgctgagcaataaattttattcatcatgctggcgctatgatggccgcaaataaccaaatctatttgccgtttattactgacgtaattcaggctatccgctaattcgccgtggagaatggccatttcagcaatgggataattggttttggcctgtaactcagccataaataagcgagcttcttcctgtaacaggttgcgcagatcgcccagcattggcgctgcaaagttattatacatttccggttcggtagtcagcgtgaccaaagaaataataccgttatgtgggcgaacgattgaaaccgccttgtcgactaattgctggctgtccggcgaaagtgaaacagcaaccagtacattttgatatttcattattctctccactaaacaacatcatagctaaagagtaggggataggccggcttgaggatgagatctgcttcacagttaatctttttgttaaattcatagcataaaatagcgccaatcgtatgcaaaatgaccttataaacggtttttatgtgtaaattttacccaaaacgagattatacctttgcaaaaagtatgggtatgtaccacatttaataaattctctccaagcgcagtagacaatgacgctatctgaaatgttttgttacgtctgttgtggctttccagacctcttttggacatttttaaccgattattcctagctggttattattcgaacacttattaagtggctgctaatggtttttaatcgtcgcgattactcgggaaaaaatatagtttacttaagttatttatagttttgacgatcatttaatttacttaatagcgattaattctgggattcccgcctcatggcagatttatgctccgttattttggtttggtgatgtttttgttcgaattgatctaaaaaagctaagaattaggcttatatgattggattttaagacggtttctgacttgggcttgttttttaaccgtcaaattgatcaaaaaataagctagctacaccatatttcagaaaattatattttatttttgtgacttgtgtcacattacatttaaaataaatcactactcacgttgtatgtgccgacgattcgggagtagagttggccctctttaggaatattcctaatatttgtaagaaaagtttcatgaacatgacgcaataatagaacggtcgaaaaatactgtagcccaagcgtctgacatgaggctacgtaacaaaatggtttttttctgtgataccagtagtcttttaattacttttagttctatacgttttaataaacggtataacgggaaggatccctggtcatgggtgataaacaccttcacccaacttatgttttaaaacataatctgtcgggatgtataagatgagtacgtctgaattactcaaacatatttatgatattaatttgtcatatttacttttagcacagcgtttaattaatgatgagaaagcatctgccatgtttcgtttaggtatcacggatactatggccgacgcattatctcaattaacgttgcctcaaatggttaaattggcggaaaccaatcaattagtttgccatttccgctttaacgatcacaacactattcatcatctgacgaaagaatctcgcgtggatgatttgcagcaaatccatactgggattttattgtcaagccacttactgcatgagttatcgttgaaagacggtagtgcgtctaaaaaaagagcatgacgatggttgagaaaagtattgttcaggaagccaaagatattcatctcgcaatggagctgattaccttaggtgcgcgtttgcaaatgctagaaagtgaaactcagctcagtcgtggccgtctgattaaactttacaaagagctacgaggcagtccgccgccgaagggaatgttgccattctcgacggattggttcatgacgtgggaacaaaatattcattcatcgatgttttataatgcctacagtttcttactgaaaagtgggcaatgcaccggcgttgaagcggttattaaagcttatcggctctatttggaacaatgcccggatcgggtggaagagccgccgttactggctttgacccgtgcctggactttagtgagattcgttgatagcggtatgttgcagctatctggctgtagctgctgtggggggacttttatcacccacgcccatcaaccgcgtaacagttttgtctgtagtctttgccagcctccttcccgcgcagtaaaaaaacgtaaactttctccgcaacctgccgatataactacacaactgctggatgagcaggttagacgcgcagtttaagtgagatttgattgttagatttttgtcaggcaggcccggtatggatactcggtttgcctgatactagcgactttcgatggatcttaaactccgcaaaacacctcaccttccacccacacactttgctaaggatgtcacgtgttagttattttgggttatatcgtggtactaggtgcggtactcggtggctacatgatggtagggggccaccttggtgcgctctatcagccgtcggaatttttaattatcgctggtgccggtattggggcatttattgttggtaacaacggtaaagcgataaaagccacattgcgcgcaatgccgaagctattgcgcagatctaaatataacaaagtgctatatatggatttaatggcattgttgtatcggttattagctaaatcgcgtcagcaggggatgttgtcactcgaaaatgatattgaagatccccagcaaagtgaaattttctctaattatccccgtattctcgccgataaaatattagtcgagtttattaccgactatttgcgtttaatagtcagcggaaatatgaatgccttcgaaattgaagcgctgatggaagaagaaatagagaccttcgaacaggaaagcgaagtccccgccggtagcttggccatggcgggcgattcattacccgctttcggtattgtggccgcggtgatgggggttgttcatgccctggcttctgcggatagacctgcggctgaactgggcgcgttaattgctcatgcaatggttggtactttcctcggtattttattggcttacggctttgtttctccgctggcaaccctattgcgtcagcaaagtgctgaaacgaccaaaatgatgcagtgcatcaaggtgacgctgctttccagtctgaacggctatgcgccgcaaatcgccgtagagtttggccgcaaaaccctttacaccaccgagcgcccgtcatttatcgagctagaagaacatgtgcgtagagtgaaagctcctgcacctcaagcgacagaagaggacgcatgaagcatcagaatcaccccgttattctggttaagaggcgtaaaggcaaacatgggggaggccatcacggcggctcatggaagattgcttatgctgactttatgacagcgatgatggctttctttttggtgatgtggttactgtcgatttccagcccccaagagctgacgcagattgcagaatatttccgtacgccgttgaaggtggctttaaccagcggtgataaaagcagctccagcactagcccgatacctggcggtggtgacgatcccacccaacaacagggcgaagtgaggaaagtaagcaaatcggccgaagcccggcaggaagaaaatcggttgaataaactgcgcgagaagctggacgaactgattgagtccgatcctcgcctgaaagcgctacgtccacacctactgattaacatgatggatgaagggttacgcattcaaattattgatagtcaaaatcggcctatgttccagatgggcagcgcgcaggttgagccgtacatgcgcgatattctgcgggcgattgcgccaattttgaatgatattccgaataaaatcagtctgtcaggccataccgatgatttgccttatgccaacggtgaacgaggttacagtaactgggagctctctgccgatcgtgctaatgcttcacgacgcgaattgctgaccggcgggttgtcggaagggaaggtgctgcgggtggtgggcatggcgtctacaatggggttaaaggagcagagagccaccgatccagtgaaccgacgcatcagtattttggtgttgaacaaacagacgcagcaaagcattgaacacgaaaatctggataacaaagcgctggatattgagaaagctgaaggtttgaaacagctcgaatccagtgcacaacctgtcgcaggaacggagtccactgcaacggttgcaccgcaggccgcaccggccgtcgagccagctgtatctgcggtaacaacacaatctgcgccggttgctgagtcgccggtagtggggaattcagtggcagcacctgacgcaccggtagcgacaccgccggtcggcgcggatgtcactccgccgccggcagcagagccaccacaaccgaatacggagacggctacctcagtcgccactgggccaacaacatcgttgccagctgcacctgaatctcaagtacctgtctctccgacaagccgcgacgcacagtagaggtgacaacgtgagcatggatattaccgcgttttatcaaacattctttgatgaagcagacgaactgctggcagacatggaacagcacctgttattgctggacccattagcgcctgataatgaacagctcaatgcgatttttcgtgcagcgcattcaatcaagggcggggccgcaaccttcggctttaccgtgttacaagaaacaacccatctgctggaaaacttgttggatggtgccagacgcaatgaaatgcgcctgagcactgacatcatcaacctgtttttggaaacaaaagacatcatgcaagaacagttggacgcctataaaacctcccaagaacccaatcgggatagctttgaatatatctgtcaggcattgcgccaactggcacttgaagcattagaaccgacggctgcggctaacgcacctgcggcggctaacgaggctaaaaccacagcgaccccggctctggttcagggaggaatgcgtatttgcctgtctggcctgaagccacaggaaatcccgctgatgctggaagaactgggcaatctgggggaagtgaaagaccctcatcagggtgaaaacagcctggaagcgacgctgataacttcagtgagtgaagacgatatttgtgccgtgctgtgcttcgttttggaaccggaacaaatcagttttgtagaagcaccggcagtagcggacgttgttataccagcgacaaatgcacctgcggcaagtgcgccagcagtggaagcggcgcctgttacagccgctgcaccggtagcggaagcggtgaaaccggctccggctaccggcgctgagccagcgaaaccgcggccaaaagccagcgaatcaaccagtattcgcgtagcggttgagaaggttgaccaattgatcaatctggtgggtgaattagtgatcacccaatccatgttggcccagcgttccagcactctggatccggtagctcatggcgatctgcttaacagcatggggcagttggagcgtaacgctcgggatctgcaagagtcggtaatgtcgattcgtatgatgccgatggaatatgtattcagccgcttcccgcgtttagttcgcgatctggccagcaagctgaataagcaagtagaactgacgttattgggcagttctaccgagctggacaagagcctgatcgaacgcattatcgatccgttaacgcatttggtgcgtaacagtctggatcacggcgttgaaaatcctgaaacccgtattgcagcaggtaaatccccggtcggcaatctgacgctgtcggcggagcatcagggcggcaatatctgtattgaggtgatcgatgacggcgccggtctgaatcgtcaaaaaattctggctaaagcgatgtctcaaggcatggcggtgaatgaacacatgagcgatgaagacgtcggcatgttgatttttgcaccgggcttttccaccgctgagcaggtaacggatgtttccggccgcggcgtgggcatggacgtagtgaaacgaaatattcaggaaatgggcggccatgtgcaagtcagtttccaggcagggaagggcacgtctattcgcatcctgctgccgctaacgctggcgattctggacggtatgtcggtcaaagtgaatgatgaagtgttcattctgccattgaatgcggttatggaatctctgcaacctcaggcggaggatttacatccgttggctggcggcgagcgcgtattacaggtacgcggtgagtatcttcctttggttgagctataccgggtgtttgacgttcctaatgctaaaaccgaagccactcagggcattgtggtgattctgcaaagtgcaggccgtcgttatgcgctgttggtcgatcagttgattggtcagcatcaggtggtagtgaaaaacctggaaagtaactatcgcaaagtgccgggtatttctgccgcaaccattctgggggacggcagcgttgctctgatcgtggatgtttctgctctacaggcgttaaaccgggaaaagcgtgtatccgttgaggatgccgcgtagccagtccgaatatggacacaggatgccgactaaggttggcagtcctgaatataagcataacaatctattcacgccgtgcggttagttgagtttaatcgcgctggccgggctaaacggcttcgtggaatagattataaattcaacctattgattgaagggtagaaacatggcaggactagcaaccgtcactaaattggctggcgaaacggtaggacaagaattcctgatttttacgctgggtgatgaagagtacggcattgatattctgaaagtgcaggaaattcgcggttacgatcaggtcacgcgcattgcaaacaccccggcgtttattaaaggcgtcaccaacctgcgcggcgtcattgtgccgattatcgatctgcgcgtgaagttcgcgcagaacaacgtgtcttacaacgaaaataccgtggtgatcgtcttgaatttcgatcagcgcgtggtgggtatcgtggttgacggcgtgtccgacgtgctgtcattaactaacgagcaaatccgcccggcacctgagtttgccgtgactctggcaactgaatacctgacgggccttggctctctcggggaaagaatgctgattttggtggatatcgaaaagttgttgagtagcgaagaaatgtcgttaatcgacagcgttgcgaaaggttaagtagataccagcgggggaaaccccgcttttttacaggtgaataccgtgtctgccgctcaatagctcccttcaggtgccgcaaaataatagttgtgccctcaggtaaagttccccctgccgctgccgataacacatgtaattgacgtacttttgatttgacgtacttatgaagggataacatgttcaagcgtatgaaagtagtcaccagtttattgctggtgttggtgttatttggtgccttacagcttatttctggcgggcttttctttaatgccctcaaaaacgataaagaaaactttgccgttttgcaggttattcgtcagcaacaatcttcactgagcgatagctgggtcaatctggttcaaacccgaaataccctgaaccgcgcggggattcgctatatggcggatgcgaacggtaccggtagcggtacgccgttgcctgagttgttgaccttggcgaaagacacgctggttaaagcgcaaaaaagttacgctgatttcgaacagattccagtggatagccgacagagcgctgaaagtacccaacgcatgaaacagacttacgatgcatacgtaggcgcgttggccgaactgatccagttaatggaagccggcaaaatcaaagagttcttcgatcagccgaccaccagtttccaggacgcctttgaaaaagattacaccgcttaccgtatgctaaacgacaacctgtatgcctcagcggtagaagacagtaataagtcattcaccgttgctatgggtatcctgattgcgattctgatcgcggtagtagcagtgatgctgatcgtttggttcggtatccaacacattctgattaatccgttaaatcgtttgattgaacacatcaaacacatcgctggcggtgatctgactcagccgatcgaagtgctgggtcgtaacgaaatgggcgcgttggcagccagtttgaaaaacatgcagtcagagctgatcaacaccgtgagcggcgtgcgtatgggtgccgatgctatttatagtggcgcatctgaaatcgctgcgggtaacaacgatttgtctgctcgtactgaacagcaggccgcttctctggaagaaaccgccgccagcatggaacagctgaccgcaacagtgaaacagaatgccgaaaacgctcgtcaggcaagccaattggctctgagcgcctctgaaaccgcgcaaaaaggcggcaaagtggtggctaacgtggtgcaaaccatgcatgacattgccggtagttcacagaagatcgccgatattaccagcgtaattgatggtattgctttccagaccaacattctggcgttgaacgccgcggtagaagccgcgcgcgccggtgagcaaggtcgaggcttcgcggtggtagcgggtgaagttcgtaacctggcgcagcgtagtgcacaggcggcaaaagaaattaaaggtctgatcgaagactcggttaaccgggtagacatgggctccgtgctggtagaaagcgccggggaaaccatgggtgacattgtgaatgcagtgacccgcgtcactgacatcatgggcgaaatcgcttccgcctctgatgaacaaagtcgcggtattgatcaggttggtcaggcggtgacagaaatggaccgcgtaacgcaacaaaacgcctcgttggttgaagaatctgcttccgccgctgcggctttggaagagcaggccagcctgctgacccaatcgatgtctgttttcatcctgcgggtggataacggtaatagtaataaagatgtgagaagaaccaagcagccggtagtggaacagaccggtactgctaaaaaaacactgggaagtgacctgcaagagaattgggaaactttctagaccctacaaaatataatattaaaagccggccttagagccggctgagaagaggttacgatgtttggccgaatccggatttctaccagctttttcctgttactgatgatgatttgctctatacagttgatatcaagtggtctgtcgtttactgcttttcgtgcagacaaccaaaatctcaaccgagtggatctgagtagccagcaacgggatgcattaagcctgagttgggtatccttgcttcaggctcgtaataccttaaaccgcgcggctacccgggcggctctcaacgtaccacaggaaaaggtcaacgaattaatgggcaatgcccgcagttcgttacagaaagcagatctctactttaaccaattcctggctgtaccccgtgttgatgccagcgccgttgaattaaccgacgcgacacaagccagctatcagaatttacgcgcggcgctgcgggaattgatcgtgttcctcgaagccggcaagttacaagagtttatggatcaaccgacccagaaaactcaggatctgtttgaagctgattttgtgcaatacctacagcatacctctgaaattattgccgaatctggccatgaaaatgggcaggcttatttgctttccaaatggatttttgctggtgcaattgtgctggtgatttctatggcgatttcttgcctgatctggctgcgtaccatgtttgtgacgccgctggcgattatgcgtgagcattttgaccggattgctcaaggcgatttagcgggcaatatttcggttaccgggcgtaatgaaatcagtcaattattcggcagtttgcgcattatgcagcagtcgctgattagcactgtgagtaaagtccgagacggcaccgaatcaatgttgaccggtattcaggagatttccgcaggtaataacgatctttccgcccgtacggaacagcaggcggcttcgctggaagaaaccgcggccagcatggagcaattaaccgcaacggtaaaacagaatgcggataacgcccgtcaggcaacgctattagccaaggatgcttcggcaaccgccgctaaaggtggcgctctggccagcgacgtggttagcactatgcacgaaatcgctgcgagttctcataaaatcggtgcaattaccagcgtaatcgacggcattgctttccagaccaatattctggcgctgaacgctgcggtagaagcggctcgtgccggtgaacaaggtcgcgggtttgccgttgtcgccggtgaagtgcggaatctggctcagcgcagtgcgcaggccgcaaaagaaattaaaggactgatcgacgaatccgttggtcgcgtgcgtcagggctctactttggtagaaaactcaggcaccaccatggaagaaattgtccgctctgtaacaagagttaccgacattatgggggaaattgcctcggcttcggatgagcaaagccgcgggatcgagcaggtttcgctggcggtcacccaaatggatcaggtaacacagcaaaacgccgcattagtggaagaggcagcttctgcagccaacgcattggaagagcaagcaggttatctctcccatgcggtgtcagtcttccgtttggcgcaagatggctacgatggggattggcaggaggctacaggtgcagataagcaacctgttgttaaggaaatctcagattgttaaacggcgtagcatgtcattttttaagggtgaggccggatgaaaccatctcctaagtcaacccccccagattctgggtcgatattaaaccagatggtacaacggttaccgctgtcggatgtgcatttccgacgtatctgccagctgatttatcagcgggcaggtatcgtactggccgatcataagcgggaaatggtttacaaccgcctggtgagacgcctgcggttgctgaatattaatgattttggtcaatacctggcgttgctggaaaccgatccgaatagcgcagaatggcaagcgtttgttaatgctttaaccactaacctgacggcttttttccgcgaagcccatcattttccgattttggctgaacatgctcgccagcgaccagggaattattcggtctggagtaccgcggcctcgacgggagaagaaccttattctatcgcgatgacgttgagcgataccttagggcatcgtgccggtagctgtcaggttttggccagtgatattgatactcaggtattggaaaaggccaccagtggcgtttatcgacaggatgaattgcgctcgctttctgctcaacagatgcagcgctattttttacgcggaaccggccctcatcaaggcttggttcgggtacgaccggaactgtctaatatgctgacttttcagcagcttaatctgttagcgccagaatgggcgctgccgggacagttcgacgcgatattctgtcgtaatgttatgatttattttgataaagagacgcaggaacgcatcttgcgccgctttgttcctttgctaaaacccggcggcctgatgtttgctggccactcggagaatttcagtcaaatcagtcgggaattctatttgcgcgggcagaccgtttatggactgaccaaggagaggtgatgagtaaaatcagagtattgtgcgttgatgattcagcattaatgcgccagttaatgaccgagattattaatagtcacccggatatggaaatggtcgctacggcgccagatccgctggttgcccgtgatttgatcaagaaatttaatccgcaagtactgacacttgacgttgaaatgccgcgcatggatggcctggattttcttgaaaaactgatgcgactgcgacctatgccggtagtgatggtttcgtcattaactggtaagaattccgaaattactatgcgagcgctggagcttggggcgattgatttcgtcactaaacctcaattgggtatccgcgaaggcatgctggcttatagcgagctgattgcagaaaaaatccgcaccgcggcgaaagcccgtttgccacgacgcattacggataatgcgccggtcatgctgagtcatgctccgctgctgagtagtgaaaaactgattgccattggcgcatccaccggaggaaccgaggcgattcgtaccgtattgcagcctttgccgccgaccagtccggcgttgctgattactcagcatatgccaccgggatttacccgttcttttgccgaacgtttgaacaagctttgtcaaattacggtaaaggaagcggaggacggcgaacgtgtgttaccgggacatgcttacatcgcaccgggggatcgccatctggaactgacccgcagcggcgcgaactatcaggtacgtattcacgatggcccggcggtgaatcgccatcgcccgtcggttgacgtactgtttcgttccgttgcccagtgcgcggggcgtaacgccgtcggcgtgattttaaccggtatgggcaatgacggtgccgccggtttgctggaaatgcatcgggctggcgcatataccattgcccagaacgaagccagttgcgtggtgtttggtatgccacgtgaagccatcggcatgggtggcgtcaatgaagtactggatctgaaccaggtaagccagcgtatgttggcgcagataagcagtggtcaagccttacgtatctagggatcggcttcagattttaatattccggtgtaaatcggcttttgttttcaatagctcagcggtgagcaacaaaccttaggagtaagtatggcggacaaaaatctcagattcttagtggtagacgatttttcgaccatgcgtcgtattgtcagaaacctgctaaaagagctgggctttaacaatgtggacgaagctgaagacggcgtcgacgcattgaacaaattacgcgcaggcggttttgattttgtggtttctgactggaacatgccaaacatggatggcctgcaattgttgcaaaccattcgcgcggacggcgcgctcgcagctttaccggtgctaatggtgaccgcagaagccaaaaaagaaaatattatcgcggctgcgcaagcgggtgccagcggttatgtagtgaagccttttactgcagcgaccttggaagaaaaactcaataagatctttgaaaaattgggcatgtaaggagtcgagatgaataaccatccaatgcccgcaactgatgcggcatcagccagtgatataatcagccggattggtaatctgacacgtatgctacgtgacagcctgcgtgagctggggcttgatcaggcgatagctcaggcggcggaagcgattccagatgcacgcgatcgtctcgactacgtggttcacatgacggcacaggcggcggaacgtgcgctgaactgtgttgaggcggctcaaccacgccaaaacgagctggagtcatcggctaaagcgcttaaagttcgctgggatgaatggtttgccaatccgatcgaattgtctgatgcacgttcactggtcactgatactcgcgaatatctggatttggtaccagaacacacttctttcaccaacgcgcagctgttggagattatgatggcgcaggatttccaggatcttaccggtcaggtgatcaagcgcatgatggatgtggtgcaggaaattgagaaacagttattaatggtgctgatggaaaatattccggaacaaacggcaaaacctcagccagtcaatagtttacttaatggccctcagctggataaaaacggtgcaggggtaattgcaaaccaggatcaggttgatgatttactggatagcctaggtttctaagctgacggtgaacgtttaaatgcagatgaggacatttccctcatctgcaatttactgcttggccatcattttgactggttatccaactgaaaaatggcgcttcactcgttgtcacagatttatagtacgtccctcacttcttcctgcctgcatttggctaacaacactgccttttccgcattgactcgcccgtagccataccatttgctgtgcccatttttatcatatttgccatttttccgatcaatcttatcgcaggagtcgcggatgatatctctgacctcaaggtaggtgagcgatggattgacggacagaatcagggcggccacgccagcggcgccggggcaggaactggaggtgccgccgaacttgttggtgtaattaccaaagagatcgccggttagcgtcataccggtattatacccgtcctgattacgtacatcggtggtccagatgccggaggtgagtggggcggggtggaatttctcaggatgggcgaaatccccgctggggaaggtacaccacagcgctttgccgaagtcactgtaggcgcagcgggtgctgcggtcattacaggcaccaacggctatgactttgtcattactggcgtaaccgttattatcgaccgattcattaccgttgcctgcggcaaagaaaaccgcgcaccctttcccgttacgccctttttctaccgcatagtctatggctagacgcgtaagcgccggtaattcggtttctctatcgtgatattcatcatcaggatcaaaccaaataccgtcggcgggcccccaactgcaagaaatgatatccgcgcctttatccgcagcccacacgaaagcgagagcttcccccatggagcctaagccatcgaccagacgaataggcatcagatttgcctccggtgctacgccggatgcgccatacaaaccatcggcgcaggccacgccggcgcaggcggttccgtgtcggttacttttatccggcaagggattttcattctcataacccatttcatagttatggggatggacgactttacccggccgcataaattcagggtgctgaatatcaaagccatcatcaataatggcaatggtgatacccgcgccgcgtgttatttcgtgggcggcttcaacgttagcgctggcgtcgacatccgtttctgttctcacggtagttttcttcaaatgccattgattggggtgaatcgctttaggcattttttggtgaattaattcaggatgacaatattccacttcttcacaattcagtatgtcctccgcgagagtaaatatatcatcgccggtatcttctatggctgaaataaaataggcgtttttaaggaatgaaatttcattttttataataagattgtatttattaatgatatattcacattgggttttttttatgtcatttttgaatttgataaagatattttctgtataaacgatcggctcagcagtttgttcattcctaaaaccgaaaccggcaaatctgacatcccgatcggtggaaagtttttctctcaattcattgataacgttttcttccccttcaaccctaaccacatagacgtttacattactgatattaaacaataaattgtaatgtaagggttcgtctttaatgattttatccattgtatcggaaaattcttttccagctttcattcttacaataagtaaatcgccggatttaaccaaaggtaaaatttttctatggttatctttaatgtcataagtaacgtcaaatcttttcatttcaaatcctttttgattgaattggtcatcggtttattatgctaacagtgaatgttagttattcttggttaatggttttgatataattaatcactcccaacttctatttatttatatcacctggaacctgtcttttacataaacgcctcgctaatgactatcaggcgtttatgacgggatattcattatcattagctagcctaagcgttatttttgctaaaaataaaatgataaaaccgaatgcagcgttgaattttcaactggcgatatctccctgtggcttaaaaattatgcgtggagcgaggcgaagcccatcgccttatcagagaaataaccgcctaattgctgctttgttccgtccatcaccccagaaaaattttgtcatgctagcggcaattatttttcctttaattttttattcttaacaggaacgcccaagctgaacagggacactgactgtggctgaagatagcgatctggaaaagagcgaggaacccacagcccataagctggagaaggctcgcgaaaaaggccagattcctcgctcgcgcgaactgacctcgatgctgatgctcggggccggtttgtcgatcctgtgggtttttggcgaatccatcgggcggcaactggcggcgatgatcgcgcagggattacagtttgaccacagcgtgattggtgatgaaaagcatatgctgcgacagattggcatgctgctgatgcaaaccgtgacggcgctgttaccggtatttattggattggtattggtcgcgctgtcggttccgatgttattgggcggcatctcatttagcgccgaatcctttaagttcgatttaaaacgtatgaatccgctttccggcttgaagcgcatgttttcttcgcaagtgctggccgaactgctgaaagcgattcttaaagccacgttagtcggttgggtcaccggcatgtttttgtggcactactggcctgacatgctgcggctgatagcggctccgccccttgccgcactgggtgatgccctgcgtttgattttgttctgcggttttatcgtggtgttgggcttaacgcctatggtgagttttgatgtgttttatcaaattatgagtcatatcaaaaagctccgcatgaccaagcaggaaatacgcgacgaattcaaggatcaggaaggggatccgcacgttaaaggacgtattcgccagcagcagcgcgcaatggcccgtcgccgcatgatggccgatgtaccgcaggcggatgtgattgttaccaacccgacgcactatgcggtggccttgcagtataacgagaacaagatgagtgcgccgagagtgttagccaaaggtgcaggagaaatagcgttacgaattcgtgagttaggtgctgaacaccgcatcccgatgttagaggcgccgccgctggctcgtgctctgtatcgtcatagtgagatcggtcagcatatcccggccaccctgtacgcggcggtggcagaggttcttgcctgggtttatcagcttaaacgctggaagctggaaggtgggctgattcctaaaaaacctgaaaatctaccggtgccggatgcactggattttgctggagagagtgagactaatggctaacttggccgccctgcttcgtttaccgggcaattttaaagacacgcagtggcagatacttgccggtccaattctgattttgatgattttgtcgatgatggttttgccattgccgccgttcattctggacctgctgtttaccttcaatattgcgttgtccatcatggtattgctggttgcgatgtttactcagcgcacgctggagtttgccgctttcccaactatcctgctgttttctaccttattacgcttatcccttaacgttgcctcgacccgaatcatcttgatggatggtcataccggtgcggcggcggcggggcgggtggtagaagctttcggccacttcctggtgggcggtaactttgccatcggtatcgtcgtgtttatcattctggtggtgattaactttatggttatcaccaagggtgcaggacgtattgccgaagtaggcgcgcgctttgtactggacggaatgcccggtaagcagatggctatcgatgccgatcttaacgccggtttgattggcgaagaggaagcaaaaaaacgacgttctgaagttacccaggaagccgatttctacggttcaatggacggtgccagtaagttcgttcgcggtgatgccgtagccggtttgctgatcatggtgattaacgtgatcggcggtttgttggttggggtgatgcagcatgatatggccgtgggccacgccgcagaaacctataccttgctaaccatcggtgacggtctggttgcgcagattcctgccttggttatctctactgctgccggtgttatcgtcacccgcgtgagtaccgatcaggacgtgggccagcaaatggtcacccaactgttcaataacccgcgcgtgatggtgctgagcgccagcgttctggggttactgggcatggtgccgggaatgccgaactttgtcttcctgttgttcaccgcggctttactggctttggcctggcgtttaaagggcaaacagaccagtcagcctgcggtggcagaacagcccgtggtgcaggatcagcagcaggctgccgaagcgacttggtcagatgtacaactggaggatccgctgggcatggaagtgggttatcgcctgattcctatggtggatttccagcaaaacggcgaattattggggcgaatccgcagtattcgtaagaaatttgcgcaggaaatgggctatctgccgccggtggtgcatattcgggataatctcgaattgccacctgccagctaccgtattctgatgaaaggggtggagatcggcagcggcgaagcccatccggggcgctggctggctattaaccctggcaatgccgtgggaacattacccggtgaagcgacacaggatccagcctttgggctggctgcggtctggattgagagtgctttgcgtgagcaggcgcagattcagggctttaccgtggttgaggccagcaccgtggtggcgactcacttaaaccatttgatcagtcaatatgctagcgaattattcggtcgtcaggaaacgcagcagttgctggagcgtgtgtcgcaggaaatgcctaagctgacggaagatttcattccgggtgtggtgtctctgacaattttccacaaagtgttgcagaatttgttgtccgagcgggtgtctattcgcgatatgcgaaccattattgaaacgctggcggaacatgcgccgaaccaaaccgatccgtacgagctgacggcggtagtgcgcgtggcgctgggtcgttcgattgcacagcagtggttccctggtaccggagaaattcaggttatcggtctggatgcggcgttggagcgtttgttgttgcaagccttgcaaggtggtggcggtttggaaccgggtctggcggatcgtttgctggatcagtcgaaacaggcattgcagcgtcaggaaatgttgggcgcaccgccggtattgctggttaaccacgcgttgcgtgcgttgctggctcgcttcctgcgtcgcagtctgccgcaaatggtggtgctgtccaatctggagattggcgacaatcgtcaaattcgcatgacatccaccattggagccgcctaatgaagtttcatgctttggttttagccgcgttagcgtcagtgtcgtggggcgcttacagtgcttccggcagttgggttgccgatgatattggtgtgacgcagaatttacgtggcgtgccgacttcatcgccggtattgcgtccgaccacgccttatgtcaccgcggagcatcgcattgtgtcggttagctggcggatacagttgctttccgccgctcccaatggtctgcaaatgaagctttgttccccctctcgttgtattgatttgaacggcggtagcggttccagccggggtctggcgggtgagtctgcaaccagtccgttgacttttgtctatctgattcaagggcaggggcgagtgaatccgccgttacaggtgatgagtaaccaggtgatagtgaattatcaatagaattccctttttaaggtaaacagattcagattgccaatatctttcaattgagccgcttttcagtggctctaaattgaggatatttacccttttctatcagattcaccttagagtaataaaagataaatataaaactggagccgatttttaaagcctcgtcgttcggcttttccctcgctttcttattgtgttttcccatctaagtcagacgaagattaagttcggatctggtttcgaaagcccggtagctcactgtttcctccctcgtgcactcttcgtccggtgagccagcgctagattcagcagcgggcgcatcctgaccctacggctcaaagcgctttaaacaactgccggctgttcactctggttcttatcccggcttggcctacttcccgattgcgccttgttaaaattaaaaccatttttcttatgagtcataatttgtctttcgccgttgatatggcttttgaccttgagcttgacctttcagagcgcatttgagttgtcgaatgaagaatgcaggcaggacgcgaagcatgggcgccgcgcttgaacaggcgcgaatcgcggcgttccgtcaaccgaaatttgatccggcacccaattttcatcaggcttgtgatgttgaccagaagcgttatctgaaaccttcagcaataacaatcaatagatgagtgagagtcagatgggtaagttaccttgcggtagatgtaacgacccggaaggaacacagtacaagaaaaatattaattttatgaagaataataacgtgaaaaaccagaggaaattagaaaggaaaaaattcacctttaacggtgatgcgtgacgaacgccaccaccgtcagataatcagctcaaaaatcaaccgcaggttgaagtttaaacgccgattttacgccccagcaggctagcgccgcgggactgaccatcggggccatacagagactgaccgtggcgcgtattcaataccgccagcgcctcatcattgtgcgcgatgtgctgattcagcaaaaaaccgttgtgcaaattggtataacgcatcttttcggcttttttcaggattcgctcccagcgctctgtcagcgcaggaacttgctgataaggggctttgattttggccgctgtttctgccgccagacggttttgatccagataatccagagtcgctaataacgaacttttttgctcggttatcccttgcagaaccacgccgtgaattcgcccgtcgcacagtaatcgctgctcttcagcaataaccacggacagggtatctaaacattccagctgttgatccagattggtctgtaatctttccaccgccacttatccttacacaattaactatttttaagataatccgcagcgtcttttaacagggcatcggcaattttaccggtgtccatggtcagttggccggagcgaatagcctgtttcaaactttctacacgttctacattaatatcctggctgcccggttgcatcagcttggcttgcgcgtcgctgagtttaacctgcgtgccgctaacttgcgctttagcctgggtagacttacgcatttgctgcgctgcctcgctggtttcgcgcggttgtaccgggctgaccggcaccagtggctgtgtgcgatcgatgctcatggtgttactcccttcatggcgggatttagattagtgacccgcaaactggtggcgggatttacgctaattcacccgcgaataactgcttgttaatggttatcggcaacgatgataaaaactttaatcactataacataatgcgaataacgccatcgtcacccaaggtgccactgacgatttgacccgacgccatacgcacccgaacgttatcctgaagggcggcgttgttcatcgccttgccttcgctattgatattaaagccttctccctgcgcgacaacctgaaccgcctgaccggccttgatcacccatgagcgcctgagcatggccttggtcagcggttgtccggcattaatatggcgtaaactgatcgtacccttagcaaaacgtgcctcgtttaacgcgccttgcggcaaggtgtccaaccgtccttccttataagccatgtctttttctgccagcttctcaccggcagtgatctggcggctggccaccagatatttccccgtgacctgcacctgcgtctgcataaaacgccgttgctgaccacagcgcaccgacaaactgacgttaccccatgggcgcgcgttggccggtagcgagatttcgggattttcacactgcggccattgagcctgtggcgtttttattttcacttcaacctgccgggtatccgaggggaattggctgtgaaagaactggtcaatctgttcggccagatccgttgcctgcgctgttcctacacacagccacgccaagcctaacccgatgacaccgcctgctttcatggaatcccctacgtcttgaggccgatttaatggcccgatagattgactgcttccccactagtgtacctgtagctgaaaagggttaaggggataaatagcgacgcattttgcccttattcaaacgataggctttccctaacgccgtttatgctgtcgactccaaattctaacctcgcgggggggctatgctcgacaaactggacggtgctctgcgctttcaacaagaggcgctaaatcttcgcgctcagcggcaggaaattttgtctgccaatattgccaacgccgatacgccgggctttcaggctcgcgatatcgatttctccagccaactgcaaaaagtgatggagcaagggcgtgttaacggcagcgggatgtcactcagtttgaccgcagcccgtcatattccggctcaaaatattcagccgccggatctggatctgctattccgggttccagaccaaccctcgatggacggcaacacggtagatatggaccgtgaacgtaccaatttcgccgataatagtctgaaatatcaaaccgatctgaccattcttggcagccagatcaaagggatgatgtcagtgttacaacaaggataaggcgtatgtctttactgaatatatttgatatcgccggttctgcgttgtctgcgcaatcccagcggatgaacgtgagcgccagtaacatggccaacgccgacagcgtaaccgggccggatggccagccttatcgcgcaaagcaggtagtgtttcaggttgccaatcaaggcgctcaggaaaccggcggcgttcgtgtcgcacagatcgtagaagacacggctccggatcgtttggtgtatcagccgggtaatccactggcggatgccaaaggctatgtgcgtatgccgaacgtggatgtggtgggtgagatggtgaacaccatttccgcttcccgaagctatcaggccaacgtggaagtgctgaataccactaaatccatgatgctcaaaacgctgactttgggccaataatcggagccgacaatggcaattaatacctcaatgaatgacagcttggacaacactattcccaataccgctgccaagcttcagcaaaaacagactctcggcggtgctggtagcagcgaagagatgcaaaacagctttctgacgctgctggttgcccagttgaaaaaccaggacccaactaatcctctacaaaacaatgaattgaccactcagctggcgcaaatcagtacggtacaaggtattgagaaactgaatacgaccttgggttcgatttcaggtcagattgataacggtcaatcgttacaggctagtgcgctcattggccacggcgtgatggtgccgggcaacagtattctggccggttcgaaggacgacatcgtgagtacgacgccgttcggtatggaactggtgcgcggagccgacaaagtgaccgccactatcagcgataccaacggtaacgtggtcaaaactattgaattccctggtggtttagaggcaggcgttcatgtctttacttgggatggcaagctggaagacggcagcaacgcaccggatggcgcctacagcgtcagtatcgccgccagcagcggtgtggagtcactgaacccaacggcgctgagctttggcgtggtgaacggtgtcaccaagggcgctcagggtaccaagctggatctcggcccgcgtggcaccgtgacgatggatgaagttcgccagattctgtaagtccgctgcttcgtgcacggaaggcattttgataaagcagtgggccagacaagagtttggttctctcatttacccggcgttttgatgttgtatcaacgccttgaatcctaacggagagtaacatgggtttttctcaagcagtcagcggtttaaacgcagcgtctagtaatctggatgtgatcggtaacaacattgccaactcggctacctctggttttaaagcaggttccgtatctttcgccgatatgtttgccggttctcaaaccggtatgggcgtaaaagttgccggtatcactcaggacttcaacgacggtaccccaaccaccactaaccgtcgtttggatctggctatcagccaaagcggtttcttccgtatgcaagacagcagcggcggtattttctacgcgcgtaacggccagttcaaactggatgaaaaccgtaacatcgttaaccagcaaggcttgcacctgaccggctatcctgccacaggtacaccgccaacggttcagcagggtgctcagccgattccgctgacgattccacagggcatgatcagcgcgaaagcgaccacttccggcaacatggtcgctaacctgaattcatctcacaagccaatcaccgaaacttttgatccggctaagcctgatacttatagcttcgtcaacaatatcaccaccttcgatagtctgggtaacagccacgatgtcagcgtgttctttgtgaaaaccaaagacaacacctgggacgtgtacacccaagacaccagcgtggccggttctaaagccgacaagcaaggcaccatgaacttcgataccaacggtctgctcaccggcacgaccgatggggcaggtgctccaagcgcaacgccattcactctgaatgtgccaatgtccgcattgaatggtgcgccagcgcagacgtttacactgaatctggccggtgccaagcagcagaataccggtactgacagcatctcagcccagaaccaaaccggctatgcggcaggtgagtttactggcttccagatcgaaaaagacggttccgtgatcggtacttactctaaccaacagaaacagctgctgggccagatcgtactgactaactttgctaacccagaaggcttgtcttcacagggcgataacgtttggaaagaaactgcggcttccggtaacgcgattctgggtacggcaggcggtggtggtttcggtacgctgaccagcggtgcgttggaatcttccaacgtggatctgagtaaagaactggtaaatatgatcgttgcccagcgcaactaccagtccaacgcccagaccatcaaaacccaggatcagatcttacaaactctggtcaacctgcgctaatcgcgctaacgggatagcagcatggatcacgcaatatataccgcgatgggtgccgcccggcagacgctggagcagcaggccgttaccgcgaacaatctggcaaatgcttcaacgccgggcttccgcgcgcagttatctgcgttgcgagcagtaccgattgacgggccgagcatggcgacgcgtactttggtggcggcatcgacgcccggtgcggatatgagtcaggggccaatgaactacagcggtcgcccgctggacgtggcgctgcagcaagacggttttatggccgtgcagttgccagacggcaccgaaggttatacccgcaacggtaacattcaggtttctgccgacggtcagatgacggtgcagggttatccgctgatgggggataacggcccgattgacgtcccgccgcaggcggaagtcacgatcgcggctgacggcaccatctcggcgttgaacgcgggcgatccgccaaacaccattgctcagattggccggttaaaactggttcaggcgcagggcagtgagctgacgcgcggcgatgacggtttgttccatctgacgccggctacgcaacagcaacgtggtgctacgttgccgaacgatccgctggtcaaagtgatgcctggcgtgattgaaggcagcaacgtcaaaccggtggaaactatggtggatatgatcgccaacgcccgccgttttgaaatgcagatgaaagtcattcacagcgtggatgagaacgaacagcgcgctaaccagctgttagctatgagttaagcgcccaggcgcagaggagtacactgatgatccgctcattatggattgccaaaaccggtttagatgcccagcaaaccaacatggacgttattgccaacaacctggcaaacgttagcaccaatggctttaagcgtcagcgcgccgtgtttgaagatttgctgtatcaaaccatgcgtcagccgggggctcaatcttcggaacagactaccttgccgtccggcctgcaaattggtacgggtgttcgtccggtggccaccgagcgcctacacagccaggggaacctgtccaagactgataacagtaaagatatcgccatcaaagggcaggggttcttccaggtgcaattgcctgacggcaccaatgcctatacccgtgacggttcattccagatggatcagaacggtcaactggtaaccgccggtggttttcaggtgcagcctgccatcacgattcctgccaatgccttgagcatcacggtagggcgtgacggtatcgttagcgtgactcagcaggggcaaaccgccgctcagcaggtcgggcaactgacgttgactacctttatcaacgacaccggtctggaaagcgtaggcgaaaacctgtatcaggaaaccgccagctccggcgcaccgaatgaaagtacgccgggcctgaacggcgcaggcttgctgtatcagggctatgttgaaacctctaacgtcaacgtggcggaagagttggtcaacatgatccagacccagcgcgcctatgaaatcaacagtaaagcggtaacaacttctgatcagatgcttcaaaaactgactcagatctaagatagctttcggggggctggattgccccctgactgcgttaggccgattggaattttggggttcaaggcagcttacccctttggttacaggtaataaaaacagagatggatacttcgccgttcagaaaattaagtggattgagatgggtctgtgcgccaacaatggcggtgctgctgctcaatggctgtgcgtatattccgcataaaccactggtggatggcaccacctctgcgcaacccgcgccagcgagtgcgcccttgccgaatggctcaatatttcaggctgttcagccgatgaactatggctatcagccgctatttgaagaccgtcgcccgcgcaatatcggcgacacgctaaccattaccttgcaggaaaacgtcagcgccagcaaaagctcttctgccaacgccagccgtaacggtgccagcaaatttggcgtagccactgcgccgcgctatctggaaggtttactgggcaacgcccgtgccgatctggatatttccggcgatagcacctttggcggcaaaggtggagccaatgccaataacacctttaacggcactattaccgtgaccgtggatcgggttctggccaacggtaacctgcatgtcgtgggggagaagcagattgcaatcaaccagggaaccgagtttattcgtttctccggggtcgtcaatccgcgcaccatcagcggcagcaacaccgttacctcaactcaggtggcggacgcacgtatcgaatacgtgggtaatggctatatcaatgaagcgcaaaccatgggctggttgcagcggttcttccttaatgtttcgccgttctaagaggccgattaatgcgtaaacaatctctcatcccgctttttgccgcactgttgtcattggtgtggctgccggcatcggcagagcgaattcgtgatttggttaccgttcagggcgtgcgggataacgccctgattggctacgggctggtcgtggggctggatggctccggtgaccagaccatgcagactccctttaccactcaaagcctgagcaacatgttgtcccagttagggattactgtgccgccgggcaccaatatgcagctgaaaaacgtggcggcggtgatggttaccgctaaattgcctgcgttttctcgcactgggcaaaccatcgatgtggtggtttcttccatgggtaacgccaaaagtattcgcggtgggactttgctgatgactccgctgaaaggcgtggataatcaggtttatgcgttggcgcagggcaacgttctggtcggaggcgcaggggcgtcttcaggcggcagcagcgtaaccgttaaccagttgaccggtggacgaatcagcaatggcgcgaccatagaacgagaattaccgactacctttggcagcagcggcgtgcttaaccttcagttaaataacgaagattttacgctggcgcagcagataagcgatgcgataaaccgttcgcgtggcttcggttctgccaccgcgattgacgcccgtaccattcaggttctggtgccaagcggtagcagctcacaggtgcgtttcctggccgatattcagaatattccagttaatgtcgatccgggcgatgccaaggtcattatcaattcccgcaccggctcggtggtgatgaaccgtaacgttgtgctggattcttgtgcggtggcgcagggcaatctgtcggttgtggtggataaacaaaataccgtaagccagccggatacgccgttcggcggcggtcagaccgttgtcacgccaaatacccagatatccgtacgtcaggaagggggcgcgctgcaaaaagtgaatgccagcccgaatctgaacaacgttattcgcgcgctgaattctctgggcgcaacgccaatcgacctgatgtctattttgcaggcgatggaaagcgccggctgtctgcgggctaaactggaaattatttgatgagcgatttgatggccatgtccggggcggcatacgacgcccaatccctgaacgccttaaagcgtgatgtggcaaaagatccgcagggcaacctaaaacaggtggctcagcaggtcgaagggatgtttgtgcaaatgatgctgaaaagtatgcgttccgccatgccggaagacggcccgctgagcagcgaccaaacccggctctatacctctatgtatgaccagcagattgcgcaggaaatgtcggtgaaaggtctcggcctggccgatatgatggtgaagcaactttccggtagccagtcgccaagtgaaacggccggtactgtgccgatggcgctggataaagaagtcatgcaaaccctgccggcgcaggcgctggcgcagatgatgcgtcgggcaattcccacgccgccgccggaaggtaccagcccgctgtcgctcaataacaataactttgtttcgcgtttgtcgatcccggccaaaatggccagccaacagagtggcattcctcatcaactgattgtggctcaggcggcgctggaatcaggctgggggcgccgcgagatcccgacggcggaaggcaaatccagctacaacctgtttggtattaaagcaggcagcaattgggaagggccggttagtgaaatcacaaccactgagtacgagcaaggcgtggcgaagaaaaccaaggccagcttccgcgtttacggttcttacgtcgaagcgattagcgactacgtcaaattgctgaccaaaaatcctcgctatgcggaagtggcggcggcgaatacgccggagcaggcggcacatgccttgcagcgagcgggttacgcaaccgatccacaatacgcgcagaaattggtgggcgttattcagcaaatgaagagcgctgggaatcaggcggtcaaagcctatacccatgatttaagtcaaattttctaacggcaggcagcaaactgacggcgtaaaaccccgaccgccctgtgatttatccccgggcggttttttttagcaggaatatcgccgtaatccatcgggaaaaatgggtattttttgccaaatttactcaagttatccgatctttggccgataaatattacaggctgcgcggggacttgtacccctcagacagtaaccctattcatcaccgcaggtgacacaaactaccgatcgcctgccgtaaaaggatttctttatgtccaacaatctgattaataccgcgatgagtggtctgagtgcggcgcaatacgccctgagcaccgtgggtaataatattaccaacttccaggtcgccgggtataaccgccagaacgctatttttgcgcaagcgggcggcaccttgtctccagcgggtttcctcggtaatggtgttaacgtgaccggcgtaaatcgtgagtacaactcctttattaataatcagttacgctcagcccaaactcaaagcgccggtctgacaacttattacaatcagatctcgcagattgataacctgttggcggataaaaataacagcctgtccgttaccatgcaggattttttcagcaatctaaaaggtctggaaacgcttcctaatgacgacgcgacgcgtaaaaccgtgttgggtaaagccgaaggtttggtaaaccaattcaagaatgcggataaatatctgcaagacatgaataacggtgttaaccagaaaattagcgacagcgttaaccagattaataactattctgagcagatcgccaaacttaacgaccagatcacccgtttacgcggcagcagcggcagcgagccaaatgctttgctcgatcagcgcgatcagttggttagcgagctgaacaccattattcctgtcaccgtaacccagcaagacggcgacgcttataacgtgtccttcgccggtggtttatcgctggtacaggggtcgaattcttataatatgcgtgcaattccttctagcgcagacggtactcgtatgaccatcggttatgaccgcggtctgggcggtgtggctgagctggacgaatcccgcattacatccggttctttgggcggtacgctgaaattccgcagtgaagcactggatagcgctcgcaaccaattagggcagttggcgttggtgatggccgacagctttaaccagcagcacgaaaaaggctttgatatcaacggcgatccaggagagaagttcttcaactttgctcagccaaacagcgtcagcaatgccaaaaacaccggcaccggccatctggatgtgagctacagcaacactagcgaagtgcaggccagtgattacagcatggaattcgacggcaccaactggcaggttacgcgtctatcagataacagtaaaatcgcgcctaaaaccgaagctgacggcagtctgagctttgatggcctgaatgtttctgtcggcgcaggcgtagcggcgaacgataagttcaccatcaaaccggtggctaataccatttctaacctggatgtggcaatcaaggattcctccaaaattgctgctgcgggcgcggatccaaccggtgtagacggtgggaaaggcgataataacaacgccaaggcgttactggatctgcaaaacaaacaattggtcaacggcaaagcgacgttgtccggtgcttacgccggtttagtcagtaacgtgggtaaccaaaccagtacggcgaaagtgaacagtaccgcgcagttcaatatcgtgaagcagcttgatgagcagcagcagtccatttccggggtaaacctggatgaagagtacggcaatcttcagcgtttccagcaatattacctggccaatgcgcaggttatccaagtggcttcgactctgtttaattccttgctggaaattcgttaaaccgaaccctgcggggataaatactcaatcactgttctgcgatacggctcgcagaacagacgctaaaaggaactgacatcgtgcgccttagtaccagcatgctgtatcagcaaaatatgcgcggcatcactgatgcccaatctctgtggttgcagtctggccaacagatttctaccggcaaacgagtgattaacccatcggatgatcccatggcagcctcacaggtgatcatgctgtctcaggctcagtctgagaatgcgcaatttgccttaggccgcagctatgcgcgccagacttcatctttggaaaccaactttttggcgcagtcaaccagcaccgtgcagcaaatgcaagcattggtgatcagtgccagtaaagactccctgagtgatgatgaccgagcttcttacgcgactcagttgcagggcctgaaggatcaattgttaaatcaggctaactccacggatggcaacggcaactacatgtttggcggtttcaagaatgacaaacctcctttcgttgccgatccggtgaccggcgcggtaacctataacggtggtgatgagcctaagactcaacaggttgattctttccgtaacatgaccgtaggccacacggggtccagcgtgtttatgagtctgaccgccaatgcgcgtccggagccaacggatccggctaccggcacgacgccagcgtcagaaagcaatattttcaataccatcgataccgtattgaacgcgctgaaaatgccaatgaatggcgcatcggaagcagataaaaaagctctccgcggatgcgatggataaagggattcgcgggttagacaactcgttgaataatatcctgtccgttcaggccgaaattggtacccaattgcaggaattggacagtctggatagcctgggcgacgaccgtactctgataaacaaacaacagcttagcgatttacaggatgtagattggaacgccgcgatttcatcctacgttatgcaacaagccgcattacaggcttcgtataaagctttcagcgatatgcaaggcatgtccctgttccagcttaaccgttaataccctgcgttcttacccgctgaccagctcggcgggtccccttttaagtgtacttaaaccgggtgcacttttcggtatgtcatcttttcccactaaggtttgggatggcataccacctttttattcgtccccccatctttagcctcgtttcaagttaacttccaaccctaaagcatcgctataacaatccgttatggcagagtgattattgctattgctgcaagtaattagtgacgtgaaatgatggggctcagagaaagagggcgctagcttcaggccatcccgccaacaacaccggccagacgatcgaagaactcaccgaacagatgctcgcagtagggagcaagactcggcattaacaagcccagaaccagcatacctatggttaaagtgagggggaaaccgatcacgaataccgaaagctgcggcgtcatgcggtttaacatccccagtgccatgtttagcgtgagcagaatagtgatcatgggtaacgcgagcataagtccactgataaagatcagagaaccgatctcggttaaggcgcggaacccgccgccgtttaggggcgcaaactgaatgggcagcgtgtggaagctgtcggacaacatagaaatcagccataaatggccgttgagggacaaaaagagcagcattgcgattagattcagcaatcgcgccagcacgggcatattggggccaccggagggatcgaagaaggtagcgaaagacagccccatttgtaacccgatgatttcccccgctaaacgaatggctgcaaaggcgaactgcatggtcaggccaatagcgacgccgatgatcacttgctgaatggcgacccaaatagcgccgacggaaaaaatgggaatatcaatgaccggcagggacggtgcaatcagaaaggtaatcattaccccaaggccgactttgaccttacggttgatcgatttttcattcagaaccggcgcggtgctgatcagcgccaatacacgaaccagcggccaaaaatattggctgactaaatggctaagctggctggtatcaaaagaaagcatgtttagccgatcagcgtaggcaagctggtgaaaagattacgcatgtaatccagaatcaaattcagcatccatggcccggcgataaccaaagtggcgaagactgccagaattttaggaatgaaagacagggtcatttcgttaatctgcgtggcggcctgtagcaggctgaccaacagaccgctgaccaacgccgccagcaatagcggcgcggccagtgccagggcgattttcatcgcttcagtgccaagcgccattaccgattcaggagtcatagcctacctttgtataaaatgagctggatgagataatttcaggctaactgtagaaactttgcgccagtgaacctagcagcaattgccagccgtccaccagaacaaacaacatcagcttaaaggggagcgagatcgtcgccggcggcaccatcatcataccgagggccattaatacgctagcgaccaccaaatcgataatcaggaacggaataaatacggtaaaaccgatctggaaggcggttttcagctcgctggtgacgtaggccggaagcaaaatacgcattggcaccgcttctgggccttcaaacgcaggcagattggctaaacgggcgtacagcgccaaatcggtttcccgggtttgtcgcagcataaattcccgcagcggctgtgagcctttatctatggcgatgtccatggtgatcttatcctggctaaacggcagataagcatcctgataaactttgtcgaacaccggtgacatgataaagaaggtcaaaaacagcgccagacctaacaaaacctgattcggcggtgccgatggcgtgccgagggcgttacgtaacaaacccagcacgataatgattcgggtaaaactggtcatcatcagcaacgccgccggtaagaagctcagcgaagtgatcaggactaaggtttgtaccggtagtgaccagctttgcccgccgttggcgagaggctggctgataataccgggtaattgcgcaaacaccgccggtgagaacaacagggcggtgaaagtgaataggggggtaagcagacggcgcatccgcaccgttaaggcaaaagtggccttgaattcagggcgctgagacgtcatgccgatttttccgggtgtttcaggattttttgcagtagctgacgaaaatcagccggtttagtggtatctggctcgacggtagggtctaccggagggcgttccatcgtgtgcaactgagtgacctgctgtgaagtgacgcccagcactaaccaggtgttatctacttccacaatgactacgcgctcgcgctggccaacctgacagctagcgcgcacattcagcaatttgttattgcgcgcctgcggagcaaagcccagccgttttaccagccaggcaccgcacagaatcagtaaaataacgccgccgagaacgctgccaacctgcgttaataccgcaccagccggaagggcaggtgccgcgggaacggctgtttggctactcactccagggtgagaattggcgaaaccggtgaccggcgtttgtgcttcactcattagcggcttaaacggcgcatacgctcagatggcgtaatgatgtcggtaatacgtacgccgtatttatccgcaaccactaccacttcaccttgcgctatcaggtaaccgttaatcaggatatccagcggctcaccagccagaccatccagagaaaccactgaaccttgcgataggcgcagcaattctttgatggtcattttggtgcggcccagctctacggacagttttaccggaatatcaagaatcagatcgatttcctgcaaattgccaagtgcgtccggtgcctccagcgatttgaatacgccttcagttgttgccgttggtttttctgtcgcttgctgctcgttaaacgcatcagcccacagatcatccacggattcctttccatcgccagacggcagcttagggtcactcattgggctgttcctcatttagagcattcaaaatagggttaatcagatgttcaacacgaagggcgtattgcccgttcagagtaccgtactggctggttagcaccggtacgccatcaacgtgggcgatcagccggtctggcttatctatcggcaatacatcgcccggtttcagttttaaaatctgagacaaacgcagcgagatctcggcaaaattggccaccagctccagctcggagtgttgaacctgttttaccaacgtttcgcgccagtgggtgtcttcctgacgtgagttttccagcggcggattggtcaatagctcgcgcagcggttcgatcatggcgaaaggaatacagatattgaattcgccgcttagcgcgccgatttccacgtggaatggcgtggtgaccacgatgtcgttcggcgaggtagtgatgttggtaaatttcacctgaatctcggaacggacatattccacgtcgatcttgtaaatggcggcccaggcgtcgcggtaggcgtccagcgccaaacgcagcatgcgggtaatcacccgttgttcagtatgggtaaattcgcggccttccactttagtcgggaaacggccatccccgccgaacaggttatcgacggcgataaacaccaaacttggctcaaacacaaatagggcagtgccgcgcagcggtttgagatgtaccaggttcaggttggttggcaccggcaggttacgggcaaattcatggtaaggctggattttaatcgggcctaccgtgatgtccgggctacgacggagcaggttgaacaaccccatgcggaactgacgggcaaaacgctcgttaatgatctccagcgcgtgcagacgctcacgcaccacgcggcgctgggttgtcggatcgtaaggcttaacgtcactgtcactgccgactatggcaaccggctcatcgtttccgctgtcgccgtttaacagtgcgtcaatctctgcttgtgaaagtatgctgtcgcccataatgattatcgcagtatgaatgcggtaaacagcacgtcgctgattacctgattaggttgacctttaaccattggcgggctgaggacggttttgatttgcgccattaaccgctgtttgccttcttcgttcgccaggctttcggcagtctggcgagacagcaacaacagcagacggctgcgaacttccggtaaatagtcgttcagcgcgcgacgggtattctcgtctggcaggcgcagagtcaaaccgatgtacagcacgcgatccaggttgttgtccggcgtgatcagattaacggtaaaggtatcaagcggcataaagaccggagccacagggacaggtttaacgttcgcaggcttgctgttgtgcagtacccaccagctatagccgccgcccgcagcagaagccacggcaatcagtactagcagaatcacccagattgaacttttacgcttggccgggatggtgttatcagacatggggaagacaaattcctgtttcgtgtatctgcataataacgcgggtatgactcgttgacggatgtcgccaccttggcaacttctgacaacctacccgcgttaaacgaataatggtgatgattatcccgcgtatcaccgccggcaataggcagaataggtgggaaaaaacggcctacctcgcccgtttgttcaattttaggcgaaaatatcaacaccgccgttgccggatgctaaagattgcagtgcggctggcgtcaccaacggtgtcagagaatcagccgattcagcgttttcgccgtaagcaggctggccattagccgcatagttttgctgattttgttgatgctgctgttgctgagcctgctgccactgagacgatccttcgctactgacactgctctggcccaattgaatcccactttcagctaaagcatgacgcagccccggcagagcggcttctagcgcggcgcgaacctgaccgtgagctgaggcgaagtgcagctgcgcctgattatcttcgatcttcagactgatttgcagcgcgcccaattcctgcggatgcaaacgcagttcggcattttgctggccgttgcggctaaacattaatacctgctggcctaacgcctgctgccattcctgactgcccaactgagcgctcaaatggccggcaaccggggcggaagcaaggccgccggtaggcgcagccatgattgggctggagaccggcggtaatgaaggggtgatagcgctggttaacaaggctttctcgccgctattgactgcttctgtcggggcgattaacgcactcagcgcagcggttttattggcggcgatggcgctgttgtcctgtgtctgaccggtagggcggttctgacgcagttctaccttttcggttttggtttttacctcggccaataggttattcgcggggttaccaccctcttttttaccgttactcaaagtggtactcaacagcgcgcccagctctttatcctgaccggttaagcccagcagactgcccagcgcttcgcctttacctgcggggctacttttggagccagcattcagattatcctgtgcggtcagccctgatttcaggctgttaccgcttgccagtgtagtcgctacctgatggggcaacatcgccagcaaagtatgtaatgggttcaggtcgggtttatcgcgctgaatttccagtttttgatcgtcttctggcgttgttttcttgccatgagactcgcctgtctgacctgcggccgttaatcctgccggcagggtcgcggtgatatcacccaatgcggccagcaactggttaagcttgctactgccttggctggttttatccccttcgacatcggcaatgttaccggtgacggcggctaaagaagatttcagcgctttggcatcggcggcatccagcttctgagccaattggctcaattggccgcctagcagctcggcaaaatccgccggtaaacccgcatcgctgaataacgcagcgatagaagaagacgctgcaccctcagtttcggttggtgtcgcaacaccgggcagtacagacagattcatgaattcaggctcctttgtgagctgcgctgggcaaactcatccatcaatttttgatccatacggttttcatggtgacgctgggtggtttccgcccgttcctgcaaggtttcgaacgcgttgaggcgttgctgtttctcttgccagtgcttgacggctaaatcgacgcgctgattccattgcaatagctgctgccggtgctgatcgattgccaattccaacgtctgaataaactgctgataattctgccaggttgaggaggccatcccgtcggataaggtatcgttcagcttgacccgatattcatcctgatagttgagcaacatattcaattgctgctcggcttgcaggtacgattgacgcacctgtcccaactgtgtactggccttttcgacggccttctgcgccaagtcgcgcagggtaacgagaggtgattgacttttcatcgtattcctcatctattacggaatgaagattggcgtcagtgagctgacggccaatcagccgggaaacagcgccttcagatgctgacaggcatcctcatagctacttcgctcaaacattccttgctgcaagaaggtttccatctgggggtaaagcaagattgcgcggtcgagcagcggatcgctccctgccgcgtaggcaccgacgctgaccaaatcgcggttgcgttggtagctcgccagtaactgtttgaactgacgaactttgctgtagtgatcctcatcaatcagcgccgtcatggctcggctgatggaggcttcgatatcaatagccggataatggccggattcggccaaacggcgggacagcaccacgtggccatccaaaatggcgcgggcggagtcggcaatcggatcttgctgatcgtcgccctcggtcaatacggtatagaaagcggtgatagaaccgccgccgctgacgccgttaccggctctttcgaccaacgccggtagcttggcgaagacagaaggcgggtagcctttggtggcaggcggctcgccaatggccagcgcgatttcacgctgtgccatggcataacgcgtcagggagtccataatcagcagcacatgctgaccgcgatcgcggaagtcttcggcgatacgagtcgcgtaagcggcaccctgcatacgtaataaaggggaaacgtcggccggtgcggcaatgactaccgaacgtgcgcgaccttctgccccaagaatattttcaataaagtcttttacttcacgaccacgttcaccgattagcccgaccacaatgacgtccgcctgggtatagcgtgccatcatgccaagcaacacgcttttaccgacgccggaaccggcaaacagacccatacgctgaccgcgaccaacggtgagcagggcgttgatagtgcgcacgcccacgtccagaacctgttcgatagcggtacgctgcaacgggttaaccggcggcgtaatcaatggtgcgcgatagccggtttctggcgcgggtaaaccgtccagcggcttggcgctgccatccagtacgcgtccgagcaattcagggccgagaggcagttgtttactggcggaagcgccattggcggtaatgcgtgcatagacgcgcgcgccgggcacaatgccttccacttcttccaacggcatcaaaaacaggcgctggccgttaaaaccaaccacttcgctttctacttcctgcacttcgccgccgtcgtgtcgttcaatcaggcaggttgcgccaaggggcaattgcaagccagtggcttctaaaaccagaccggtggcgcgggtcagacgaccatagcgccgaaccgaaggcgactgaacgattcgctgttccagtttatccagtgtagtcagccagcggccaagacgggcggtcattacaaatctcccggtgcggccaggcggcacagctcatgccaacgggttgcgacgctggcatccagatcgccttcttccgcgctgactttacaaccaccggcgtgaatctggctgtcggccagcaaacgccaaccgtgcaggctcagggtggcgcctaagcgctgctccaccatcgccaaatcgtccggatttacgcgcaactgcggtttgccgttaaacattggctcttgctgaatcagctgttggatttgacccagcagtgcggtgccgtcacaaatagccggttgccccaaaatctgtttcgccgccgtcagcgccaattgcatcaaacgagaggcgatgacgctgtcgagggaatcgagcgtattttggaaatcagcgaccagcgcctgccagtgagcggtcatcggctcttgcagtttctgcgcttccagcaaaccttgttcacgcccttccagcagcccggtttgatagccctgatccagaccttcctgcaaacctttggcgaaaccttgctgccgaccctgttgctccgcctgctgttgcaaactttgcagcacctgctgttggtcgggttcctgtggttcgcctgcttcgtcggtaaactcggtcatcgcgacttccggctgggtagccggagcgtcatcaaactgactggcgaaatccttgggagcccaaggctgccagggcagggcattaagctgatcagacatagatgtcctcgccgccgccaattacgatctcgccgctttccgccaaacgacggacgataagcaggatcgctttctgttcgctttccaccagtgacatacgcactggcccacgcgtggccagatcgtcgcgcagaatctcggcagcacgcagagacatgttgctgaggaaacgttcgcgcagagcctgatccgaccctttcaatgccaccaatagggactcggagtcgatctcttgcagcaaacgctgaatgctgcggtcgtcgacgccaaccagattttcgaacaggaacatctcgtcgataatcttttgtgccagttcgccatcgtattcgcgcatggcgtccataaccgcttcttcctgctgggttttcatcaggttgataatctcggcagcggtgcggataccgcccattttgctgcgtttgagattctggccgtccaacaggttgttcagcacttcagtcaattccgccagcgccgccggttgaaccccaccgaaggtggcgatacgcagcatgacatcgttgcgcagacgttcgtcgaacagcgccagaatatcggcagcctgaccgcgtttcaggtgaaccaaaatggtggcgatgatctgcgggtgctcgtcccgaatcagatccgcagccatctgcggttccataaagttgagggtttccatgccgctggtggtttcgcgagactccagaatatcttccagcaggctggaggcacgttcttcccccaaggctttcaccagcacgccgcgcaggtattcgctggcgttgacgctcagcgctgcatattgctcggcgtcgtcttcaaactcgactaacacgtcaattaattgctgatgagaaacctgacgcatactcgccatggtggtactcagttgctgcacctcccgcgacgagaggtgtttgaaaacttctgcggcgtggtcttcgcccaacgtcatcagcatgatggcgctcttttcagttccggtcaggctcattggtctgtactcatccattgacgaattaccagcgcgacaacgcgtggatctttatctgcaagttcgcggatacgctgggcctgaacttcagcgcttacacgctgttgtgatttcttacgcagggccagctcttctttgctctgtttcactgtttcagcggtttgtgccgtctgcgctgcgttattagccgcagtaatcgccggattcacttcctgtttcttagcgataaacggacgtaccagtttgcgccacagaatccaggcaaccagcagaatcaacagataacgaccggcactcatcaactgctcgaagaaggattgttgtttccagaacggcagggcgctgctggtttcttcggttgcggtaaacggcgtattgaccacgtttagcgtatcgccacgcgcggtagagaagcccatggcttcacgggttagcgcctcaatttgcgccaactgatctttgctcagcgcgatcggcttgccggttttcttgtcgatatccagatagttaaccaccacggcgacggacaggcgttgcaccatgccagcctgttgctgggtgtgacgaatagtccggtcaacttcatagttagtggtttcatcccgacgactgctgcccggaacgctattgcggttgccagtgccggcggtgttgttgcggttagccgcagtggctgcggcggtattcgctgctgcaccggtagcccccggcgctgcgccaactggcggagtttcaatcggagcaaccggcgtggccgaaggctgattggataaagcgcccggaacgccgccgattggcgtgccgccaacctgttcgctttggcttagctgctgtgaccgtaccgcgccctgttcagggcgttggtttggtttgtattcttcgtccgtctgctcgcgggtcgcaaaatcaacctgcgcggtgacctgagcgtggacatttccgttaccgaccatcggagccaaaatagactcaatgcggcgttggaagcgggcttccacctcattggtaaatttcaactgagcggcattcaaatcgcgaccggcgctatctgattgcgtcaacaggcggcccgtttggtcaacgacggtgacgttacccggaggtagaccggccacgctgctggaaaccatataaacaatggcgttaatctggccatcatccaatgcgcgcccaggctgtaaagccagtgtgacggaagccgaaggggatttttgttcacgaacaaacagcgaaggcttcggcaatgccaaatgaacgcgtacgttcatgaccgggccgagggtttcgatggtgcgggataattctccctccaacgcccgttggtagttgatttgttcactgaactggctgatgccgaatttttcctgatccagcagttcaaagccaacggcaccgcctttcggcagcccttgctgcgccaggcgcagacgggtttcatgcaccttgtctgccggaatcagcagcgcaccgccgttttcggcaaagcgataaggaatattgagctgagtcagttgagtgacaatagcgccgccatcgcgatcgctcaaattgctgtaaaggacgcgataatccgggcttttcgcccataacattaaggcgacaacgatcgacactgcggcagcagcggcgataagtaacggaatttttggattggcgcgcaggcgattcaacagcccgctaaagccattctcacggttctctacgccagttatcgaggcattcatacgcattccttgccaggctggacaacgttgacgttagtatttgtgtaagtagtgtatcgaaacaaaacagactccctggtacgtaagcgacaaagcagcaatcgccggtctccccttttatgggcatgccattatttgtcggattaagggaatttgatgagtcaataaggcgatgtttttgtatctaattagccggtttagctaaaaaatgatgtgttagggtgtcagcctgaaaataccaatctgtgccgggcttaaagaatatccgtcctgagcacgcgctttttactgaggttttatgtccattcaaggtattgaaggtgttttgcaacaaatgcaggtcagcgcattacaggcggcaggaacggccaaagtgctgccggctgagccgggttttgccagcgaactgaaggccgcactgggtaaaatcagtgaagtgcagcaaacggctcgtactcaggcgcagaatttcgaactaggcaaaccgggcattggtttaaacgatgtgatggtcgatatgcaaaaatcctcaatctccatgcaaatgggaattcaggtacgtaataagctggtttcggcctatcaggaagtgatgaatatgggcgtttgatggcaacgcagctattcagatgatgcttgcccataaaataaggttgagagcagaaaagttattttcatggatataatggactaagataattaactaacaaggatgaatgtatgagtaagaatcaaagaattgctatgtttgcggccataggtggcgttggttatctggtatggtacgtaattaaacatactacgggattataattttctattattattggctccccacttgtcatcaatgctactggtagctccgaacgatagggctgcccgagttgatcattatttttctatttatgttatgacgcttagcaaaacgctgatttcctagcgccactgaaatgcttttccctgaatgactccacattgtcataggataatgtggagtcattcaggggggctattcgacgtaatcctgctgtcagcttccggacaattcatataaccctgttctactgcctgattataacggtttaaggcgacgaagaacggtgagcgatggccatctttccgttaagtatcatgaaggcaatcccctcttatcttactgattatcatcatgatatacggtgtcccgccggtgtttatccccgattgtttagtggcttaggtagtgaaaatcgtcgcctgaacaacgggcagagaatcatattaaaagaagcctaggcagcaggcgcttaatatcggaatagccagtaatgatatgtggcgtatgatattaaatatccttaatttaaatttcgattaatctttcgtttaactgaatttattaatcaagcctcaattaatcaacggagtttccgcagtaaggactcaatcagtcagcaggaaagccttatattataaagcgtcgctattatatgtgttggcgtctattatttatatgtttgtttatttcaattaatgttaaataagaatggccaattaacatgaaaggaacagctatagtcgaatgctatattcgacatgatttaattgattttttgtacatcctttaattacattcattttagtgataatgggtggagtctagggatattgtcatgccacagttaaaactcactatttgttatcaacacaattgttgtattaatcaatgctgtgtttacatacaaatcttggaataaaaaggatgaatccatgagtatgaaattaagcagtaaaatctttgcttttgctccggtattgttggtcgcagcctgtaccacgacgccattacccccagtaccgcaggctttgctgggcgtagatcgcggcatggcaggaatagataactgtgcggtagggtgtccaacgggaagccagagtgatgaaaccctggttcgagatagttatacgttgaacaataatccaagtactaagtttgctaactgggttgcctacaagattacaaaatctactcaggccagcagccgaccgcgtaactggaaaaccgatcctgatttacctgccagcgatactctaagccctgatgattataagaatgcgaatcaagtgctgaaaatcgatcggggacatcaggctccactagccagtttggccgctgcccctgactggcagagtcttaattatttgtccaatattacaccgcaaaaagccgcgttaaatcagggggcatgggcgaggctggaagatcaggaacgtaaactggcgaacagggcagacattagcgcggtttacaccgtcaccggcccgctgtatgaacgttctatggaaaaactgcctaatgtgaaaaaaccgcaccaaattccaagcggttactggaaaatcatttttatcaataacagcccggcagtcaatcattacgccacttttatcctggatcaggatacgcccgccacggccaatttctgtgattttcaagccacggtcagtgacgttgaacgtcgcgccggtttaactttgtggtcgaacttaccgactgaaattcaggcgggattgaaaaaaacgcccggcgtattatcagagcaaatgggatgctcgccagccaaagcataaaatgtagtggggcagcctaaaaaagaaataaacccgggagatatattccgggttttatctgtcgtagagtcatcggcggcttaaccctatattttcactcagataaaacctatactgaagccactttatcactgatggttagtctattgatgagattatttcacaggattaaagggcgtatatcccccactttttgtctggccgtcatggtcgctattaacggttacctgatattagggccggtactttcccgtaccttaagttatgttccccaaaccctgggtagcataggtacatggaaagaaacgttgtccatgttagggctattggaaattccccgttttgtcattggtcttagccttattctgatggcgataggtttagctcttaaagcgcgtactgcttgggttttcactctgtttttgctgctggcaatgacattgctgaattttatgaacggtaatagtgatgtgcatattaccggtttgtccgtcgctattattcttggcttactgatttgttggcggcagttcgatcatcaaagcctggccagtagcagcttatttgctatcgtcagtatttcttcattattgttgtacgcggtgattggcacgctttatttaggcgctgaattctctcctgcggtggaggatctaccgacggcgttctatttcgcgatagtggcgatgtcaacggtaggatttggcgatattgttccggcgaccacgcatgctcgcatgtttacgctttcgattattattatgggtattacggtatttgcggcatcgattacagccattgtcgggccgatgattagccataatatccagcgaatcgttaaaggcaggatctctcacgtgatacgtaaaaatcattttattattgtcggtacaaccccattggcactgaatgtgtatcaaggtctgcgggatcgtggcgaactggttaccctggtggtggctaccggaacaacggcggagttaccgaaaggcgcagacgtggtgactggcgatccgtcatccgtagcgactttgaaagtcgcaggtgcagataaggcgaaatatattattaccctatgtaatagcgatgccgagaatgtctttacccttttggctgcgaaagaagtggcagggccagagactaaaacaatttcgttagtcaatgaaagccagaatcagccgaaaattaagcgagttaatcccgatatggttttttctctacagctattggggagtgaattgttagtcagaacactcagtggtgaaactatcaataatgagctgatcactgaaatgttctttggcagttgcgtgaaggcaaattgatttttcagacagcactgacgatattccgttaagtgccaatagcctttatcccacgccggtaacgcccattccggcgtggagctattatcagcaacgatatctttaatcaccataatctgtatccgtagcgctcacggtcatatctcttggtattacggggtgccaaccttacgtagcagagtggtaatatcgatgagatcgacttgttctggttgaatataggttttggcatagtcttgccagattcccgattcgataaacaagataaacaattgtcgatcaagatgattgtcgttaaccatattcgccatgatattcaatgactcggacagttttttacctgctttataagggcgatctgctgcagtcagcgcttcaaatacgtcagcaatggccatcatacgcatggtcagactcatctgctgggcattcagttggttaggataacctttcccatccattctttcgtgatgtccaccggcaatggttggtacgtttgacatggtacgagggaaggggagctttttcagcatgatgatcgtctgcatgatgtgttcattgattttataacgatcttcttccgtcagtgtccctcgtctaatactgaggttatacatttcaccatggttatacagatgagtgggtggttgcaatttgaaatcataatattccggatgtttgattttatcgtcccgataaataatatgttcctctttgtcggccaaaagtggctcttgagccggtaagggtttttgcggtgtgcggtttttcctagacatctcttcattgcctaggccggttctatcatcgagcgtccgtgtccagcggtgttgagcaatatcatgaatgcgcttaatggcttcatcggataatccctcctgaccaatattggtctgggcgatgaaatagtagtcctcatccagtttccgtaattcctgatttatttgcgagcaatctggctcttgcccagattgggctaggcattggcgtaaaaaatcgatttctttctctcgttttaatacttcgaaacgcatacgaatttcatgaatccggttataaatggtttccagcttggtggctttatcaacaataaattcaggagtggtaattttcccgcagtcatgtaaccagcacgcagtacgcagttcttcccattcgtcattacttaaactgaaatcggcaaaggggccttctttcatttcaacggcaaccttcgccagcatttcggtaataaccggaacccgttgacaatggccgccggtataagcgcttttggcatcaatagcgcctgcaatcagcttgataaaggaatccagcaggtttttttgttcctgcagcaaatgctgagcctcgacagaaatggacaggctaccgactagcgcattaaccagttgtatccgtgaatacttcctttcgtgattgatcgactcatcatcaaagagtaataagaatccgagtaaatgatcgtcatgtcctcgtatcggggcaataataaaacgcagaggaagctggtcggccaatacctcatacagggcaggccataaattatctttattcactattcccgatgaggttctgccgtacatcacaggattaaacggagtgaaatagctatcgctaatagccagtttaggcatgttgctaacgtcaatggactggtttttccattgaaaggcgatagggaggaatgcggggtttttggcatcattcaggaaaataacaccgccggacatactcgcaatttgcgtggtttccaataataaaccttccatttgtgccgcaaaattgtggccagcggcgagtatattccccatcgaaataaattgattgagcgtcaatttcatcttcttcattgatgcgtgtaattcgtcaatttcctgaataactgacggttcactttcccgttcatcaaaatgtaaatggctaatggcatcggcatcctgacgtagccgtattaaggggtgagatattctcagagaaaagaaccaaatgatgggtaaggttaataacaggagcgcgcaggcaatgagagtcgagttattacgaatctggttagcattagcggtaagatacgacgatggtgtggcaataattaactgatatttattctcatttatcggaatgatgctgccataccattcttgctgttcactggtgaatatatggctttggctggttgcccccgtagatgatgttttgaggcctaacaatgacactaatactgggctaatactttgactctctcctcttgaatttaaactcgcgatagcatcattctttgcgtcaataatgacggcctggctgccaataggtaaattttgctgttgtaagaactcactcagtgaagcgagagatatatccattcccactactgagcttctatttaacgctcttttactaaaggttatccccggttctttagtcgcatgatagatataaactggcgaaatagtgacaccgttattctgcaatgccgaggtaaaccaggtgcgtaatcgcggatcgaaaggatccttttctacccgccggttagcaattatttgttgcttcgcatcaaggaaaatatagtcttttattggtgattcaccggctatttggctgcgctgtattatccattcggtattggggggagcacctaatatagggcgattagtattactggctcgccttagcagaaagaaatcaccgttgtcataaccactataaatagcactggcatacttatttgaatttaaaatctcgctgagccgttcaatcgagaccatttgtcgttcaaagacggtgttgtcggttatgggtaagctagctaagatattgactgacatagacatagagtgagtaatgctatccagttctgtggcaatggctttccctgttttttgatattgttccagagtactgctttcggtcagtttggtgagctggtggtgattaaacaaaataatgacggtgccaatgatcagaattagcagcgtaaataaggatgctatctggatatgaagagggtaacggtttttaagactcaaagtcattcgtagcataggtacctgcgtgcagattacctccgattacttttataatagttgttattgcaaaaactgtattcaagagacataagtatcatcattaatttgttgatattaaactcttttatttattttttcgaagataaaaaatgcgggttggtaatacgctaacgcgtctagattcaactaagaataacattaaacattttaaaatagcttacccgccgccttgctctataacaggaataggctaggaataagacggtttgaaatcactattgtattgcgactctgtttccaacgagcctgacgccagtcggtggtggccgcgtatggctgttggcgcgaagccaaaacgtttacggaatcgctctgcaaagcgtgatgaactttcatagccgacgcggttggcaattaatgatatcggccagtcggtcgcttgtaacagcgttaatgcgctagtcatgcggacatcgatcattaaattgcgtaatacaacgttctcggcagaaagtttccgtcgtaataccacttcgctcatagacattcgctctgcgacctcggcaaccgtccatattttatgagggtcggttgccagacaacagcgtactttttctgtcagcgtttctgcatcttttattaagaacttaacgccacgctgggtcagccaaagcaatagctccaccatgcgatggcgaatgatgggcttcggaatatcattgttatcagctaataccttaaaagtattggtgaaagcattgataaactccggcgcaggattacgcaccggcatgacatctggtattacggacaggtcatgggctttgggattatgggcaaatgtattgattaactgaggttcaatactcagcgtatggctgaagaaaaccccatcagcagataacccgttgactatatctatagtttgaccaccgctgatagcggccatctcgccgggcaggattatacattcctggttttcccagcgaataaccttatggccgtggttaaccataatcagcagtgggtgttgtatataaatcgaggtgagtgcaagttcagtatgttgaataacatgccttgaactgccaatccccgaacatagattaattgtacgttccatcgatattcatttcacagtctttacctgagaatatctttacgcgttgcgcaccagacaagcaacttattttaatacaaatttagtgcgtagtgctatttcgtcgagaaaaaaaactggtttgttggcgcacacaaatagccatgtaaacagggcaaacacaccgataaaatcacgctcatccggagtaataaaaaaacattacttgcaatgttaatgatttcattcgaatgtaaaatgagaatatctatcttgttgttatgttgataaaaccatcgctattgtgtttcacctaataacaccgcatggtctgggaactgaccataagtattatttaccacttgttgtcgggttgattgtccgaccagttcgcttaattcattaaggcgtagctgtaataagcgcttaatttcagtttcattatctaaaatgttttttaatttctttcttaatatctcttgcagtgaaagagacgaacaagaagaaatggtcacgttggcggtactctcaacagctttcagataagtcatttccagatcaaccagcgcatcccaatttccctcaattgcaaaggcaagcatttgttcactgagggtcaggatatgttgatattcggatagaaggtgctggtgacgttccattaaatggggtcctaattgggttgataattggggccgatctgccgccaggcatcagcaatattttcaagcaaggcttcgacttcgacaatagcctgctcgtcattatgcaaattggcatgcagtaagcgacgtgacatatagtcatacaacgctgacagattttctgccagctcgccgcctttttccatatcaagcccagtacgcaggccgttatcaataatattgatagctttggaaatagctaatccctttgcggcaatctccccctgattcatcaaaatacgtgcgcgaaccagggcgctttgcgccccgtcgaacagcatcacgatcaactggtgggggctggcgctcatgactccgctttccaatcctacctgtgcgtaagcctggctccctgaccggttgtacatgttttctatcctttgttatttaaattgtgccaacagcatgttgcctgtgtttttgaacgaggtaaccaatttatctagctgaccgaactggatcttgtagcgttcaatcgtggcattgatattggctgttgttgaaataacctgtttatccagatttttcaatgaacggttgatcccgtcggttgcacttttcagcgtacctttcgaggtatcaagggcaccattcagcagtttatccatttgggtagcaaacccggtagtttcaccgtccccggcaaagaactggttaacgctgcctggtttttctttcagcgctttatccagtttctcgttgtcgattttcagcttcccattaagatcctgagtgatccccaggctagctaaggttttgacatcgccgccttgagcagaagataactgggctttcagttgggtctgaatattacgcagcgtattgtcaccgaccaattcaccgttgccggacgactgctcttgacccgcttcaaccgcggtatatttggtcagtgagctaaaagtggtttgcagtgagttataggcatcaacaaaagcctggatcgcatctttggtcgctttgggatcgcgtaccacactcagaacttctggggtgtcaggtttggtgacgctcttcaacgtaagcgtcacaccagcaggtgcatcggtaattacgttactttgacgagtaatatcaatgccgttgactttcaatttggcatccgctgctggaacggtttgcttcatgccatcggtgctggtgcttcccggcgtatagttcaggatcttgcctaaatcatcatcgccagtcacgctaacggtcatttccgacttggtgccggtttcttttgaagtcagcgaaaggtaataggtatcgtcatcacccttcattatactggcggtaacattgccttcctgcttgttgatagcatcgcggatatcattcagggaggttttatcttttgccaatgtaacttccatcggcttttcttggccaggctgagtaatagtaatggttcttgtttcattactattgcccaaattatcttttgtgttaggcatcttgccggatagcaaggattgcgccttagccaattgagaaatttcaatattatagctaccggcgctggcagcactgtcggttgttgcactaaatgcttcatttttactgctgaccgacgtgccgtttattgtgtctgcttttttcagggccgccgcagcagtttccacttttgccagtgcgttttgcagcacgccaaatgcagatagtttccctttaaagctggtttgttgctgggtcagaggggtaagacgcttttgttctgctgcagacaaaccgtctaacagttcacttaaattcattcctgaaccgctacctaatgagctgatacttgccatgtctaatccttaatattcaagtgtcgtgatagcgttatcggccaggaggaaaaaaagtttacacataaaatacaaatagtgatggatggaatagcggggcattaagtacagctatttgcgctattgaactgaatgacgggtatatcgtgtgcatatttatgcatcaaggcagaatgatttcaattgcggattaaagttctcggcgcaggtgccgatagccttttgtgatggcgacgataactcagtccaatcgccaataatactcattagctacattgaaggaatatcactatggcggtaattaatacaaatagcctgtctctgatgacacagaacaacctgaacaaatcccagtcttctttgggcaccgccattgagcgtctgtcttccggcctgcgtatcaacagcgcgaaggatgatgcagcgggtcaggcgattgccaaccgtttcacttctaacattaacggtttgactcaggctgcgcgtaacgcgaacgacggtatttctctgtctcagaccgcagaaggcgcgttgggcgagatcaacaacaacctgcagcgcgtacgtgatctgaccgttcaggcacaaagcagctctaactctgcatccgatatcgattccatccagtctgaagttaaccagcgtatggaagaaatcaaccgtgtgaccaagcaaaccgatttcaacggtatcaaagtcctggacaaccgtactgcgaccgattccaactacgatttccaagtgggttctaaagacggcgagaaaatcagcatcgctatcggttcaagcgcgggctggaacctggcagcggcgggcgccggcggcgtttctggcgatactgtcaacacttaccaattcaaaacgactacagcgctgggtactgcccaaactgatgtaacgacgaaaaaaaccgactttgataccaaaacggctgacgctgcggcgaaaaacagcgcttatctggctgcgaaagcaatctctgatgcatctggcgtagcgggtgatgttgctgcaaccgcaacagctaaaaccgcatttgataccgccactaccgctgtcggtactgccaatactgcattgaccgcctctaacgcggccttcaaaacggccttggatacatcaacggccgctggtgaagcggttaatggcaatgcacgtaccgttgcagctaaaggttttgatgtactgaaaggtaatgtggattcagctggtctggctgtcggtacgacgccattggctgatatcgataaagccctgaaagcggtcgatactcagcgcagcgtgctgggtgcgtctcagaaccgttttgagtcaaccatcaccaacctgaacaacactgtaaacaacctgacttccgcacgtagccgtattcaggatgccgattactctaccgaagtgtccaacatgagccgtgcgcagatcctgcagcaggcagggacttccgtattggcacaggctaaccaggttccacaaactgtcttgtctctgctgcgttaattccccgtcgagcaggatatcgagcctccgcattgcgggggcttttttgtgtttgttatttattggttttttaataaaaacacgcgatttaattaaagctatgaatgcatgtgccgataaataaagggacggtgattgaagccgtaggcaagaagcctaaacattagccgaaacatatttaaggaataataccatggcggtaattaacactaacagcctgtctctgatgacacagaacaacctgaataaatcccagtcttctttaggcaccgccattgagcgtctgtcttctggtctgcgtattaacagtgccaaggatgatgctgcgggtcaggcgatcgccaaccgtttcacttcaaacatcaacggtctgactcaggctgcgcgtaacgcgaacgacggtatttctctgtctcagaccgcagaaggcgcgttgggtgagatcaacaacaacctgcagcgcgtacgtgatctgaccgttcaggcacaaagcagctctaactctgcatccgatatcgattccatccagtctgaagttaaccagcgtatggaagaaatcaaccgtgtgaccaagcaaaccgatttcaacggtatcaaagtcctggacaaccgtactgcgaccgattccaactacgatttccaagtgggttctaaagacggcgagaaaatcagcatcgctatcggttcaagcgcgggctggaacctggcagcggcgggcgccggcggcatttctagcgatactgtcaatacttacgcatttactaagaaagctgcggttgatacagcacaaactgattacgacgcgaagaaaaaaatctctgatgccgatgccactaaactgcctgacaccgctacagctaaagcgactcttgatgccaaaatgaaagaagcgactgacgcaggcgaagcggttaacggtaacgtgcgtaccgttgctgccaaaggcttcgacgtactgaaaggcaccgtgaccggtggcgccgccggtaccgcagatgccggtggtcctttggctgctatcgataaagccctgaaagcggttgatactcagcgcagtactttgggtgcatctcagaaccgttttgagtcaaccatcaccaacctgaacaacaccgtaaacaacctgacttccgcgcgtagccgtattcaggatgccgattactctaccgaagtgtccaacatgagccgtgcgcagatcctgcagcaggcggggacttccgtattggcacaggctaaccaggttccgcagaccgtattgtctctgctgcgttaatttggtcagggttaatcatacaaaggcggctcttagccgccttttgtcatagggtagcatccccagaagggtattagcctatgatacatgcaagcattccagcaacgggaaggggtattaagtgaaagaacttcaggtcattcagccagattatgtggctaactttagctgtgtaggctccgcctgccgcgaccattgctgtaaacgctggagtattaccctcgataaagagacttatcgaaaatatgcgaaaagccagaatgcggatatcagacgtatcgctgtaaccaatattattgttagtaagaaaagtcaggcaaactgggcttcaataaaattgaatgaagaacaaaactgcccttatttagatgaagaacgtctgtgtaatgtgcataaacgtctgggagggagggcattaagcgttacttgtgccacctatccgcgtatggagcacatatataagaagcaaaaattaaatacgttaaccatttcctgtccggaagcagcgcgccaggtattgctgaatcctaatgcattaaatatgcaagcgacgactattactcaaacgggaaattttaaagcttctgatctgaatatggaaaatcagttggttaatctgttctgcgctaatttaattatgccggagcaaagccgtattgaagaaaatatttacgccatcacatcattcttgctgtattaccaaaaattaagtggtgatgtagaaagcaagttacccgcaatggaagctgcctttggtgatttggtgaataaattacagaatggagatattgcaggatatcttagtaacattccatttaatcagggacttcagtggcagttattaatgcggttgcagaagtttactactgacgcacctcacgcgcgcggccgcgaaacgttatttgcttatttgggacatttaatcaaccatttggtgatcgattttgataatgagcagttggaagaacggatgaaacagttgggtaacatatggaatgagcaggcgatgcctttcctaaaacagcgtccttatctgctgcgtaactatttcctataccgtttacaccacgaccagtttgcaatgaaaggcgatcaacctctgctaaaaagcctgtatctcctggtggtcgattatttctttatcaagtcgttgatcagcgctcatttgattaaaattggcgatctgaccgaagaacatgtcatcgatattttctactcctatcacactttccgccagcatagcgccaaggccaccgccgattttatccatgaaatcgaccaagtcaaagtgaacgacgatttatctcttttgcaactgctggtgtagtcaaacgtgctgtggcgcaggtttaaattggcctgtgccaactattttatgcagaaatgttttgtcactcccgaactaaaaaagcgcataaggcaaatagccgcccttttctatgtctattccggcgattgtctgcgtgacctgacaggataatggtacgactctcttacccgtaggtgcctgtcatagtgagcgatctatataccgccgaaggcgtgatggataaaaattccctctggcaacgctacgttcctctggttcgccacgaggcactgcgtttgcaggttcgcctgcctgccagtgtagaactggatgacctgctgcaagctggtggcattgggctgcttaacgccgtcgaacgctacgatgcgctacagggaaccgcctttaccacctatgccgtgcaacgtattcgcggtgcaatgctggatgagctgcgtagccgcgattgggcaccgcgcagcgtacgccgcaatgcgcgcgaagtggcacaggctatgcgtcaggttgaacaaaaagtcgggcgaccggcgacggaacaagaggttgcccagattctggatatcaatctggatgaataccgccaaatcttattggataccaataatagccagctgttctcctacgatgagtggcgggaagagcatggcgaaagcgttgaacccgtattggaagggcatgatgatgccaatccgttgcagcacctgttggaagggaatctccgtcagcgcgtcattgaagcgatcgaggcattgcctgagcgcgagaaaatggtgctgacgctgtattaccaggaagagctgaacctgaaggaaatcggcgcagtgctagaggtgggggaatcccgcgtcagccagcttcatagccaggcgattaaacgcttacgtgcccgcctgaataacgactcttaattcacattcgctcaattttattttttgctttagcctaatttatgcaggtcttcttatgtctggacttaccttaaagaaaaggccgctgagccgctatctaaaagattataaacacacccaaacccactgctcgcactgtaataaacaattggaacgtatggcgttggttttccgcgggcaaattattaataaagaagccattgccggaatggatcaaccgattgacgatcaggtctgggttaatttacaaaatgagctgacggcgctgtgccgtttttgcagtgaaatatattgtaatagctcgccgggctattttgacattatggcattcaaacaatatttatttgaacaaactgagatgagtcacagtaccgttagggaatatgtggtgcgtctgcgtcgtttagatgaaatgctggtagccagtaattatccggcagagaaatttgccagtgagaccatgcatcagcgaattatcgatgatctgccaaatgcggcacataataattatcgcattgcattgcgaaaatacgatcaatatttggcctggcaaaaaaattactaaattttattcagctattgattgacgcccgacggtggaatattgcctcgtcgggcgttttgcatttatatactctaataatcgatttagccttcactaaaagtcagtgattaatcatctgacatctgataaatctatagaatcgttctatttcattccttttggaggatctgtgactcttcaacaaaaactggcgcaatttccgcgtctggatctggttgggcataccacgccattagaaaaactttcccgcttgtctgattatttgggtcgtgaaatttacatcaaacgagacgatgtcacgccggttgctctgggggggaataaactgcgcaaactggagtttttggctgcagaagccttacagcagggcgcggatacgctggtcacagcgggggccattcaatctaaccacgttcggcaaactgccgccgttgcagccaagctaggcttacattgcgtggcactgctggaaaatccgatgggaacgcaagcagaaaactatctgagcaatggtaaccgcctactattggacctatttaatgcggaagtggtgatgtgtgacgctttggtcgaccccaatgcgcagttggctgagctggcgactcgattggaggcgcagggatttcgtccttatgtggtgccggtgggtggctctaatgccttgggagccttgggttacattcagtgctcgctggagatagccgcgcagtcgcagggcaaagttaatttcagttcagtcgtagtggcatccggtagtgcaggaactcatgccggtctggcggtgggtttacaacagttattgccggaagtggagttgattggtgtgaccgtttcacgcaaagccgaagagcagcggccaaaagtggcgcaaattcagcgagacctggctctttccctcggtatttctagtgttgcggatatcaatctgtgggatgaatactttggcccgcagtacggtatccctaatgatgaaggcacggcggctgtgcagttattggcgcagcaggaaggggtgttactggacccggtttataccggtaaagccatggctgggctgatcgacgggctggcacaacagcgcttttgtgataacgggccaatattatttatccataccggtggcgcgccggcgttgtttgcctatcatcctcatatatgaggatcgatattatttattccattttcaactatagttatcaggttatattcctttatttgattcctaagactgataacgtagcgatatcaaaacgataaacatgacaatcggggtatctatgggcttttcaattgtacgtcgtcgagtggttctgggcatgatggcggtggcactggcaacgggcttgaacgtcaaatcctatgcggcaggcgatctgttggatcaggttaagcaacgtggaactctcattgtcgggctggaaggaacttatccgccgtttagcttccagggtgaagacggcaagctgaccggtttcgaagtggatttcgctaatgcattggcggaacacatgggggtgaaggccaaaatacagcctaccaaatgggacggtatgcttgcatcgctggaatctaaacggattgatgtcgctatcaaccaggtaactatttccgaagatcgtaagaaaaaatacgatttctcaacgccttatacaatttccggtattcaggttctggttaaaaagggcaacgaaggcaaattcaacaagccggaagatttgcagggtaagaaggtcggtgtcggtttgggcagtaactatgaacaatggttgcgagccaatctgaaaggcgtcgatattcgtacttatgatgatgacccaactaaatatcaggatctgcgtattggtcgtaccgatgccattctggttgaccgtttagccgcgctggatctggtgaagaaaaccggtgataccttggttgttgcgggtccggcttttgctcgtcaggagtctggcgtagcgctgcggaaaaataatccggagctattggcggcgatcaatcaagcaattgctgaaatgcaaaaagatggcactttggcgaaaatttcagagaaatattttggtgcggacgtaactaaataatgcaagaaagtattcaactggtgctggattcagcaccatttttactgaaaggtgcctggttaaccctccagcttagtctggggggaatgtttctgggattagcgctgggctttatgctggctatgatgcgtttgtcccattttttacctttttcactgttttcccgtttctacgtttcaatatttcgtggcacgccgttgatcgcccagttgtttatgatttattacggtttaccgcaattcaacattgaactggacccaatgccggctgcattgctcggtttatctctaaataccgccgcttatacctcggaaacgctaagggctgctatttcttctattgagaaagggcagtgggaagccgcggccagtatcggtatgacgcgctggcagaccctatatcgggtgattctgccgcaggccgggcgtacggcgctcccgccgttgggcaacagctttatcgggctggtaaaagatacttccctagcggcaacgattcaggtgccggagctgttccgtcaggcacagttagtgacttcgcgtacattggaagtctttaccatgtatctggccgcgtcgttgatttactggatgatggctacgttgttgtcggcgttacagaatcgactagaagcacatgttaatcgtcaggatcaggagtaacgatgagtaccattgaagtgaagaaattgaccaagcaatttaacggtcaacaggtactacgtggcatcgatctacaggtaaatactggcgaagtggtggcgattattgggccgagtggctcaggtaaaacgaccttgttgcgtagcattaatctgttggaaattcctgactctggcactattcgcgttggtgatattcagattgacggttctaaacctattagtaagcagcaaaaacaggtacgagcgctgcgtcagcaggtggggtttgtgttccagaacttcaatttattccctcatcgttccgtgttggaaaatatcattgaagggccggtgattgtgaaaggggaaaagcgcgaatccgcagagaaaagggcgcgcgagttgctggcaaaagtcgggttgagcggcaaggagaatgcctatccgcgccgtctttcgggtgggcagcagcagcgagtggcgatagcaagggctttggcgatgcagcctgaagtgattttattcgatgagccgacttcggcgttggatccagagctggtgggcgaggtattaaacaccattcgagctttagcggaagaacgacgcactatggtgatcgtgactcacgaaatgagttttgctcgcgatgtggctgacagggcgatctttatggatcacgggcagatcgtcgagcagggggtagcgaaggcgttgtttgcaaatccgcagcatgagcgtaccaagcagtttttagataagtttctgaataatagataatgtttgggggctggtttcgaaagcccagcagttcactgtctcctcacttaccgtggaggcttccgagccgggttggcagttgcccaaccctgcacccgggcttggcgcgaaagtggggttctgcgaacctccctcgggcgcgcttcgtccggcgagccagcgctagattcgcctgcgggcgttatcaggatgccatgccatcctggccctgcggctcaaggcgcgctttcaacagctgacggctgttcactcttggcctcatccctgctcggcccgcttcctgattgcgcctgttgagtgcaaaaccagtgttcttacgaatcacaatttgcctttcgtttttgatagggcttttgacattgagtttgatttttcagagcacatttgagcggctgagacgatgagtgagggaacccacgcagcgggcaggcgatacgtgcggaggcgcggattgttaaggctgtggaggtgagatattcaccaagataatatcaatcgaaaccggatgcgatctcaaactagctttagatgccgaacctaaaaaataaaaaggctcctaagagcctttccgtttatacataaaccaaccatcaaactatcagccgatagtcatcaaactggcgttgccaccggccgcggcggtattcacactgagggaatgctccactaacagacgctccagcagaatattggtttcaccgcgcgcgaagccctgtactgacacaatcgcgccgtcccgctgcgccacttgctcgcacagggtacgtagttgatcggcatcaccgtgataaatcactgcgtcaaataccgctttctcactttgccaatccggcgtcaaggccattcgactctggacggcagcaggcaagcgacggaataattccttctgaataccgctgtccggccatagtacctggctgccaaccgacagcactgccgccagctgaatcaaagcatcttgctcattatccgctagacacagcacccgctcacgcggcagcagcgcataggtattgcgctcaccggttggccccggtagcaggcgaatagttccgccctgagccaggtcactgtagcgttcagccaggctaacgagatcgtttcgcttctgttcattagcccagctaatcagtgcgcgatgagcggtcagcagggattcacgtgcggtgacgtcctgtggatgctcactgtcctgacgcgccaaggtcgacgttaccgcgtcttccggacgactacacagcagacgatacagatacagcggcccgccagctttcggccccgtgccggatagtccttctccgccaaatggttgcaccccaacgaccgcaccgaccatattacggttgacgtaaaggttgccgactttagcgcgatcggtgacgcgagcaatggtttcatcaattcgggtatgaatacccagcgttaagccataaccggaagcgttgatttgatccaccaacgcggtgagattctggcgctggaaacgcactacgtgcagtaccgggccaaagacttccttttgcaactcgtcaaagctttccaattcgatcagcgtcggtttgataaaggtgccgcgctgccactctttctcatcctgagtatccgcctgcgcggcctgatagactttgcgacctttggcacgcatcgcctgaatatggcgctcaataccggctttggcctctgcatcgataaccgggccgatgtccgtagacagacgctcaggattacccatacgacattccgccatagcgccacgcagcatttgcagcgtgtgctcagccacgtcctcctgaatacacagaatacgcagggcagagcagcgttggcccgcgctgtcgaaggcggaagcaaccacgtcggtaaccacctgttcggtcagggcggaagaatctacgatcatcgcgttcaaaccgccggtttctgcaattaacggcgttggacgaccctgaggatcgaggcgaccggcaatgctacgttgcagaatgctggcaacttcagtggagccggtgaacatcacgccgcgcactcgcgcatcattgaccagcaaggcaccaacgctgtcaccccgacccggcaacagctgcaatacaccctgcggaataccggcttccagtagaatacgcaccgcctgagcagcgaccaacggagtttgctccgccggttttgccagcacgctgttacctgcggccagggctgcggcaacctgtccggtgaaaatggccagagggaagttccacggactgatacaaaccaccggaccaagtgggcgatgactgtcattcgaaaaatcatcccgaaccattccggcgtaataatgcaggaaatctaccgcttcgcgtacttctgcgatggcgttgctgaaggttttaccggcttcgcgcaccagaatgcccatcaggttttgcatttgagcctccatcaactcggcggcgcgtaccaaaatggcggcgcgttcagtcggcggcgtggcaaaccagattgggccagcggctgcggcagcatccaatgcgcggctgacttcatcagtagtggcttcacggacataacccaccacatcactcggttctgccgggttgatgaccggttgttctacgccgccctgatctcgttcggcatcaataataggttctgcaagccaggcctgagtggcgctggttaatagtgcgctggatagtgaggccaggcgatgttcattggccagatccaaaccgctggagttggcgcgctcacttccgtacaaatcccgaggtaatggaatacgtggatgaggcaatcctagctgaccttcagcggcggccagcgcctctacagcggcaaccggatcggcgactagctcatctaatggcagcgttgcatcggcaatacggtttacaaacgaggtattagctccgttttccagcagacgacgcaccagataagccagcagcgtttcgtgggtgcctaccggtgcataaatgcggcacgggcgattgagcttaccatcggccacttttcctaccacttgttcgtacagcggctcgcccatgccgtgcaggcattggaattcatattgacccggataatagttattgcccgccaaatgatagattgcggacaaagtatgtgcgttatgagtggcgaactgaggataaatcaggtttggtacagccagcagtttacgggcgcaggcgagataagatacatcggtataaaccttgcgggtatacaccggatagccttccagaccctccacctgtgcgcgcttaatttcgctatcccagtaagcgcctttcaccaaacgaatcatcaggcggcgacggctacgctgcgccatatcaatcactgcatcaatggtgaatggacagcgtttttgataagcctgaatgacaaaaccgataccgttccaaccggctaactgcggctcgaaacacagtttttccagcagatcgagggagatctccagacgatccgcctcttcggcgtcgatattgataccaatatcatactgacgagcctgtaatgtcagggacagtaggcgagggtataactcatccatcacccgctcgtattgagcgcgactatagcgcgggtgcagggcagaaagtttgatggaaatacccggcccttcataaatcccacggccattagaggctttgccgatagcgtgaattgcctgctgataggaaatcagataagcctgcgcatcggcttcggtcagcgccgcttcacccaacatatcgtaagaataacggaaacctttatcttccaacttgcgggcgttggccagcgcttcggcgatggtttcaccggtgacaaattgctcgcccatcaggcgcatcgccatatccacgcctttgcggatcaatggttcgccgcctttaccgataatacggttcagagagctggagagtttagcttcattatgagtggagaccagacggccggtgaacagcaaaccccaggttgccgcgttaacaaacagtgacgggctgcggcccaaatgggaatgccagttaccgttgctaattttatcgcggatcagcgcatcacgagtcggtttatccggaatacgcagtagcgcttccgccagacacattagcgccaccccttcctgagaagaaagagagaattcctgcaacagaccttgcaccatgccggcgcggccattggcacttttctggttgcgcagcttctcggcaataccgtaggccagtttgtgggtcgcatcggccagatcggccggcaaacgcgcctgttccagcaacattgggatggcttcggtttccgggcggcgataggcggcggtgatggcggcacgggtgacagactgcggcagtatatgttctgcaaaatcaaggaatggttggtgggctgtttccaccgattgcggcataatgtcgtccttttcagcaggggaagccgttgccaacgctggaatttctggcatatcagcgccattttccaggcgttccagatagttaaatatggcctgcttaatcagccagtgcggtgtgcgatcaattcgttgtgctgccgttttaatacgatcgcgtgtcgcctcatcgagtttcacgcccattgttgtgctgcccatgccgtctggctcctgtcctaaattaagggagttatgttttttattcgtcacaatatctagcatgttgcaactttgtgcaaccatgttaaatcagggcaattaacgaactgtgaaattagtcggatttttaacattctttctgggcgcagttattactttgttttcattgggagggggttaacattactaaatacagggtttctacgggttttgctcagggtgcaactcactttagggtgcaaggtgaaaccgggaactattgtaaatgtgatgtagggtaaattttatgtaaattttttgttgaaagagttgttgctaaagaagagagtcctctaggatagtcagcgcgacaaattagtttcgatgataaatcatctcaggtgcaacctaatgctacgttccggcattcgcactgaactagacaccctgccatcgctggcgaggtgtttttaaactgatgtattaatgaaaaacggaagtattaaaacgtataaaacgcactatggagacgttgcatgatgatgaacacaccaatgctggtgacatttctcgtttatatatttggcatgataattattggccttatggcctaccgggcgacgaataactttgacgattacattttaggtggacgcagcttaggcagcgtagtgactgcactttctgccggtgcctctgatatgagcggctggctgttgatggggctacccggcgcgatttttctgtccggtatttccgaaagctggatcgctatcggcctgactttgggtgcctatctgaactggaaactggtggccggccgtttgcgcgtgcaaaccgaggccaacaataatgcgttaacgctgccggattatttcactagccgttttgaagataaaagcaaactgctgcgggtgatttctgccgtagtgattttggtgttcttcactatttactgtgcgtccgggattgtagctggtgcgctgttgtttgaaagcaccttcggcatgagttacagcaccgcgctgtgggccggtgccgccgcaaccatcgcctatacctttatcggcggcttcctcgccgtgagctggaccgataccgttcaggctaccctgatgatttttgctctgatattgacgccaattattgtcattctggccgtgggcggcatcgatacctcgattatggtgattaaagccaaggacgccgccaatctggatatgctgaaagggctgaatattgtcgcaatcctgtcgctgttgggctggggtctgggctactttggtcaaccgcatattttggctcgttttatggcggcagattcccatcacaccatccgtaaggcacgtcgtataagcatgacctggatgattttgtgtctggcgggcaccattgccgtgggtttcttcggtattgcttacttccagcaaaacccagagttggcgggacgtgtttccgaaaacggcgaacgtatctttatcgagttggcgatgttgctgtttaatccgtggattgccggtattctgctgtccgctattttggctgcggtcatgagtaccttaagctgccagctgctggtgtgttccagtgcgattacagaagatttgtataaagccttcctgcgtaaaaatgccagccagaaagaactggtatgggttggccgtatgatggtgttgttggttgcggttatcgctattgccatcgccgccgatccggaaaacaaagttctgggtctggtgagcaacgcttgggcaggtttcggcgcggctttcggccccgtggtattgatttccgtgatgtggtcacgcatgactcgtaacggtgcgctggccgggatgctggttggcgcaggaacagtgattatctggaataagttcgcgtggttcgggttatacgaaatcattccgggctttattttcgccagtatcgccattgtggttgtcagcctgttaggccgtgaaccctcgaaaattgtgaccgatcgtttccataaagccgaagcagaattcaaaaccatttaagcctttcgattcgctcactgtccgttcaggcaggcagtgagcgccttccttatttatctaacctccatgacacaatatttccccaaccagtccgctcttataaattcgtatccctgaaataatcagacatatttattggcaacaatccgaacgagttccttgaatttcccgatggcagaatgataatcactatcgttttaagttttactttttttatcgctggattgataatcaatatcgctagtgagttttacctttctttacttaaattgacgttacccaccatcaggggtgttaagcatgtttgtcccatttcttattatgtttcgcgaaggtcttgaagccgcgctgattgtcagcctgattgccagctacctgaaacgcacccaacgcggtcaatggatgggagccgtctgggccggcgttattgttgctgtagcgctctgtcttgggttgggtatctttattaatgaaaccaccggtgaattcccgcagaaacagcaagaactgtttgaaggtatagtggcggcggttgccgtttgcatattgacctatatggtgttctggatgcgcaaggtatccaaatcggtcaaggttcatttggaaggagctatcgatcacgccctaaactcgggtcgtcgtcagggctgggcgctggtggcaatggtattttttgccgtggcgcgtgaaggtctggaatcggtattctttttattagctgctttccagcaggacgtcggcattggtgcacctattggcgctattttagggttaacctgcgccattattgtcggtatggcaatttactggggcggcgtgaaattgcatctggccaaattctttaaatggaccagtctatttatcctctttgttgccgccggtttggctgccggagccattcgcgcattccatgaagcgggactttggaaccattttcaagatatcgccttcgatctgactaatgtgctgtcaacgcatagcctactgggtaccttcctggaaggtatattgggctatcaggaagcgccgagcgtcagtgaagttgccgtttactttatctatctgatcccagcattgattttctttttcctaccgcagcgcgaactggccgcatccggtgctcgatctgcgaataaaaccaaccattaatcttatttttaggtcagggagtcatgacatgtctaatcggttcttccgtcgtaccgcactgcacgccgcgctgttggcgttgcccgctttcgctatcagcgccggcgcgcaggctgctgatgctaaagttccgcaaataaaaattactgttaatgataaacagtgtgagccaatggcgctgaccattccggcgggaaaaactcagtttgtggtacacaatgccagccaaaaagggctggagtgggaaattctgaaaggcgtgatggttgttgaagaacgtgaaaacatcgcaccgggctttacgcaaaaaatgacggctaatctggaaccgggtgaatacgacatgacctgcgggctgctgagtaatccgaaaggcaaactgaccgtcaccgccaccgaaggtgcagtagcgactaaacctgacgctatggcgttagtcgggccgattgcggaatacaaagtgtatgtcacacaagaagttaatcagttggtgattcaaactaaagcctttaccgatgcagtgaaaaaaggtgatttagcgctggcacgccagctgtatgccccaactcgtcagcactacgagcggattgaacctattgccgagttgttctccgatctggacggcagcattgacgctcgcgaagatgatttcgagcagaaagccgccgatcctaacttcaccggtttccatcgtctggaaaaaatcctgttcggggataacaccaccaaaggggcggataaatttgccgagcgtttgtatcaggacacattagagctgcaaaaacgtattaaagatctgacatttgcgccgggtaaagtggcgggcggcgcggcagggctgattgaagaaatcgcggccagcaaaattagcggtgaagaagatcgctatagccgcaccgatttgtgggatttccaggcaaacgtagacggtgctcagaagatagtgaatttactgcgtccattgctggagaaagccgataaaccactattgcaaaaaattgatgccaatttcaaaaccgttgatacattgctggctaaatatcgaaccaaagacggcttcgaatcctatgaaaaactgactgacgctgaccgtaatgctatgaaaggccctattaccgcattggcggaagatttggcacagctgcgcggcgtgttgggtctggattgaggttgttaacatggtaatgaaaatcgacccattaaatgggccgtctcagccatcagatggggcggaatcgccttcgcgcagacgcttgttattgggcatgggcgtgatgagcggcgcattggcactggggacgaataaagcggctcaggcggcaacggcaggttctgacatgaccgctgaaaagaaagatgagcgttggcaaaaacagccgttttacggcacgcatcaggcagggattttaacgccgcagcaagcagccatgatgctggtggcctttgacgttttagccacgacacctgcggatctgacgcgtttatttaaactgttgacccaaagaattgcttttctcaccggcggcgggcgtgcgccggaagttgatcctaagctgccgccgctggactcgggaattatcgggccagaaatttatcccgacaatttgactatcaccgtgtcggtcggtaactcattgttcgatgaacgttttggtctgcaggcgaagaaaccgctgcatttgcagaaaatgacccgttttcctaacgattcactagatgcaagcctgtgtcacggtgatattctgctgcaaatctgcgctaataccaacgaaacggtgattcacgcgctgcgggatattatcaagcatacgccggatttacttagcgtgcgttggaaacgagaaggctttatttctgcccattctgcgcgcagtaaaggaaaggaaacgccgatcaatctgctgggcttcaaagacggtacggcaaatcccaaaaccagtgatgtacctttgatcagccgggtggtttgggtgccggacaatgtgggagagccagcctgggcggtgggcggcagctatcaggcagcgcgtattatccgctttaaggtggagttttgggatcgaacgcctttgcaggagcaacaaacgatttttggccgggataaacacagcggggcacctttgggtatggttcatgaacatgatgagccggattacgccaaagatccagacggtaaagttattccaatggatgctcatattcgcctggcgaatccacgtaccgtcgaaactcaggaaaacctgatgctacgccgtggttacagctattcattgggtgtatcaaactccggccagttggatatgggactgctgtttgtctgctatcagtccaatctggaaaaagcctttctggcggtgcaaaaacggctaaacggtgaagcgctggaagagtatgtcaaacctattggcggggggtatttttttagcctgccgggcgtacctgatgcgaatcattatctggctcagggtttgctggaatcgtaattattgtcggtcattgagtgtctgtatggctgcggtatctgatgatatcgcagctatttttttactgattgtaatgaatgttttgtaataacaatcaaacttaaatttttatcaacggctagattaatcggcatagattaaattattttttaatgattgtgagtgataaaaaataacaacccttccacctgtaagtctcccatcaaaacgaacatttgctttctgctcctcaattaacgggttgatttttttgtttttttatatttattttaaaataattctgtctgtgtcattggtatgggttatttatcaatggtatatgttttttatcttaaatgaaccaggtatcttcatatggtttttacgttatgtaaatatgtaacgttgtcaaaacacaaccttacataataggtcgttgttaatatttctaattactttaatttagaatggcagctgcgagattaagcatttagatatcatcacactaaacttatcaattatattaatggaggtatttatgaaacaaatgactagagaagaatctcacttagtttctggcgcaaacggtattacgatcaataattctacggttacaatcgcatttaatccgtacaacaatggtatgccaccttcagtgtcaacgcctgtcactccgattgataatccaggggttatgcctacactggatcctattcctgttgctactgaacctttccagcagggaactctcataccaacgccgatgagccttcagttttatcaaagatattaatgagtcaaacttgatgatattgtggttttaattatcaattggtattgcatctaagctaatattcattgatcacccttttatcattaacaatagagttagctacggtgcatttatggccgtggctatttatatagctgatggttattttttaatggacgctgcgatggtgatttttatacggttagaggcctaggggaataacaagtaagaaaatcaatgacgagtgatatgtcatttgggtatgactacgctgatctcgaggtggatttttttattacaaacgtagtaaatgatatggaaacattatcaactctttagagcataacgttatgaccagagaaagtatatttcggaaagaagtattggataatgggaaaacaaaatggaacggtaaggcgctgttaataaaaggcgtttcaccctggattgttttaaccgtatctgttgctattattcttatgcttgttacgttacttacttttggtgaatatacgagaaggattaatattgccggagagattattaccgaatctcacgctataaatctgttttcccctcaacagggatttattacgcaatccctggttagcgttgggcagaacgtaaaaaaagggcagcagatttatcaaattgatattagcagggtaacagattccggtaatgtgagcggtaaaaatatggcatccatagaaaaacaaattattgaactggataatcttattcgacgagtaaaagaaaataaattctcaattgagatgaatctggaaaaacagatagagcaaaattcacatgcttatcaggagtcacttaagctcattgaagcctctaagaaaggcgtggctgagatgcagcgtactttagataactatcaggaatatcaaaaaaaagggctcatcagcaaagatcagttggctaatcagcgagcaatattttatcagcagcaaaatgcctatcaaagtctatatcgtcaaagtatgcaggaaaatacccagctaacgaccctcctaactgaaaagaatattcgcttggctgattttgataatcagatttctcagtatcagtatcagcgtatcgaacttcagcggcagctcactttggctgaatcgagcggtatgttggttatcaatgcgcccatagacggaaaaatagaatcattgagcgtaacgccggggcaaatggttaatctcggcgacagtttggctcagttaaccccaaaggaaaagaagcaatatcgcctggtattatggatacctaccagtagcgccccctatgttaagcccggagacggaatcaatatccgttatgacgcttttccatttgaaaaatttggccagttttccggacatattatttctatttcagccgttcctgcatcctctcaagaaatgtccacttataacaatattcccaaaggagcgaatcgtaatataggaacggcctactacaagacgctagtcgcaatggatgaccaatcgcttttatatcagggacgacaattgcaactctccaacggtttaacggcgcaggcaacgatatttatggagaaaagaccattgtataaatggatgttttcaccgttctatgacatgaaaaaaagcgtaggtgggccgattcatggataaattaacggtgaaggatctttttagtcgcctggattttaattttcgtcggcgggtgcccagaataatacagacagaggccgctgaatgcggccttgcctgcctggccatggtctgtggatttcacggatttcatgtggatttgtttaatttacgtaagcaatacggaatatctctccaaggggcgaccttagctcacctagttgatattgccactgcgcttaagcttaaaacacgagcgctatcattagatatagaggaaattgatcagcttaaaaccccttgtgtcttacattgggatcttaatcattttgtcgtattggttacggttagggcatcttcggtagttattcacgatccggcaacaggaaggaaagtgatatcaaaaaacgagttttccaaacactttaccggtgtggcgttggaactgtggccagccagcgacttcagccagaaaacacaaaagagtcgtttaaaactggctgatctaataaagaatattcggggactaaaagggttcctgattaagattttttgcctgtctctgttgattgaatctattaatttattgataccagttggtacgcagctggttatcgaccatgtcataaacgctgaagattataatttactggcactaatctgtatggggttagtcttttttacgctgttccgcaccttcaccagcgtattcagatactggttttctatagtgttagattcgctggttgatgtgcagtggaaggccggtttattcgatcatttgatgactttaccgctgtcgttctttaaaaaacgcagcttgggtgatattcaatcgcgttttgattcattagcaacactgagagtgacgctaacaaccagcatagtcagcgcgattattgacgggattatggccgtcggattactcattatgatgattctctatggcggctggctggtctgggttgctctaggatttacttcaatctatattttgctgcgcttgttaacttattattattttcgccaggcgtcggaagaacaaattattaaagatgcgaaggccaaaacgcactttatggaaactttctacggcgtctctacgattaaggcactcggcctaacggccattcgcgctcagaattggctcaatctcagcattgaggctgtaaacgcaactattcatattactaaacttaatatgttgtttggtggggttaactcactgattggcatgttagagcagattattattctctggatcggtgcctctctggtaatggatgggaatatgacgttggggatgtattttgccttcaacactttccgcggacaatttgctgagcgggcatcgaatttgatcaatctggcgtttagcttgactatgttaacgttgcactgcgagcgcatttcggatattgctttgtctgagggggaggtattaaaacctactcggacctttatcaaacgcggtgaacccgcggagctgaaaattcgtaatttgtccttccaatacgatccattttccaaaccgttattctcagaactgacgctgacaattgccgctggcgaaagcgtggccttggttggaccatcagggattggaaaaacaacgctgatgaatattatttccggtctgttgattcccactaaaggggaggtattgattaatggggtggagataaacgcgttagggctgaataattatcgggattgtatagcctgcgtcttacaggaggacaaattattttccggttctatcgctgagaatattgccagttttgataaaaatatcgatatggaatgggtgattgcctgtgcccgatatgccaatattaatgacgatatcgacagcatgcctatgggctacgaaagtattatcagcgaattgggagggagtttgtcaggagggcaaaaacagcgcttgctgattgccagagctttgtaccgccgcccgagcattctatttttggacgaagccaccagccatctcgatctcattaacgaagcagcgattaacttgagtattgcttcactgaatattacgcgaattatgattgcccatagaccttcgacgattgcgtcggcacagcgagtcattcaactggatcaactatcttctgccgctttatagcgccagatagcgacgattgacagaaaaggagggcgccgcaaaaaacgtgcgatgcccatttgatattaactatttaatttagcggtgatttttgcgacatgctcaccctggaagcgggcaatggctaactcttcattgcttggctgacgtgaaccgtctccgccagcgatcgtggttgcgccatatggcgtaccaccgcgagtgtgcgagacatcaaacagttccggtgcaccgtagccgattggtacaataataaaaccgtggtgtgccaaggtcgtccaggtagatgagatggtgtgttcttgtcctccgccggtaccggttgaggcaaaaacgctggcaactttgccatataacgcgccggatgcccataaaccaccagtttggtcaaggaaagtgcgcatttgtcccgccatgttaccaaaacgggtaggcgtaccgaagatgattccatcgtagtccgctaattcctgcggcgtggcgactggcgccgactgattgattttcccacccgccttggcgaaggcttcggcaggcatggtttccggtacgcgttttaccatcacctctacgccatcaactctgcgaaccccttctgcgatggcctctgccagcgtttcgatatgtccgtacatagagtaataaagcactaaaattttcgccatctcgccgttctccaattttctataggatgatgttgatgaagggataatagtgagcacataagactcttattaaacatactccaataaggcacaggcgcaactgcatagaccggcgtatttttagctttaaatgtgatgatgcttaaagtgtgggatgatttaaggtttacgcaatttattttgtagtcgcttctgctgccagcggtccatccaattacccagaacaaaaatattgattgcctgaatggacaaagagataccgaatcctaatactacccacccgatccagtaatactgaggagaggtgaaccagttaatcacaaacaggaacaggcaaagtattagcgagcgaaacaatctgcggaagaagttcatctctttttcaacggccagacgcgcattttcaacacgctgatcgatagggtcagtcgcttccttattttctcctgcggtttcgccttgttcattaactaaatacagctcattcaccttcaattccataacagcggcaatagcgcttaaagtttcaaggctagcttgttcgccattttcaatacgttgtatggtacgaacgcttagggaggccatttctgccaactgttcttgtgaccaacctcgtgccagtctgagctctcgaacccgataaatggccatatctttcttcctgataataaggtgtgttctcccagcatagaacgatgcggaagatgtcaccacgacaagcacctgacactaggatgacagccataggacaccaacctgacagcgtaattatccgttgaatactcacataacgacacttgtttttacttatgacggtgacccagatcccaccttgttattgctctccgtaccgcatttatatatcggctatgcttggcgctaaggtttaattaaataggatatttatggactcaatattgtgccgcgacgcagatgggtgcctcacgatagtgcaagttgtggtaaatggatggctgattaaacgtttctttatcgatggagaagtctggggacctattgaggttaatagcgcggatgaaatggtgattctaggtgtgaaattttcagaacgaggctggttaagtattaagggaacaattcattcagaccctcaggtattacgtcgacaattatcctgtgggtgatcgtattagtttagacagcttgttactgtagtttcaatatgtgttagaagaaagaaagcatcgatagcagggaggggcagggagaataaaggtgagtagattactattaagcttatctatataaataacataataatcccagatgaagagagaaaagaaagcgtggttttggctgacccaataccacgcttttttatcacctttaaatggtctggcttatcagccaatcattccaacgggctatttattatcatacaaacgggttctgcgttttttcaggagagtgtaggacactgccagaataacaaaccacaacggcgtgacaattagcgcctggcgggtatcttcctgcaaagtcagtaacactaatacaaaggcaaagaacgccatacaaacccaagacataagaatacctgcaggcattttataaatggattttttgtgcagggcagggcgacgtttgcgatataccagataagaacacaaaatgatggtccaaacgaacataaacagaatcgcagatacggtggtgaccaacgtaaatactgtcataacgttaggaatcagataaataagaacgactccgcctaataggcaaatacatgaaaaggttaagccggaagccggaaccgagcggcgagataacaccccaaattgtttaggtgcatcgccttctttagccaaaccaaacagcatacggctggtggagaatacgccactgttggcggaagaggccgcagaggttagtacgacaaagttaatcacgctagctgctgcaggcaggccgactaagacaaacagctccacgaatggacttttatcagccaccacggaactccacggggtaaccgacataatcatgatcaaagaaaatacatagaacatgataatccgaatagggatagagttaattgcgcgaggtaagacgacttccggatctttggtttctgcggcagtggtgccaactagctcaattcccacgaaagcaaatacggcaatctggaacccagcaaagaaaccgctaattcctttcgggaacatgccgccatcattccacaggtggttgaacgaggccacggtgcctgacggagactggtagctcattaataccatggttaaaccggcaaaaatcaaagcgacgatagccacaatcttaatcatggcaaaccagaactccatttccccgaacatttttaccgtggcgagattcagagatagcagtaatagaacgactagcaaagaagcgatccactgtgagaagcctgggaaccaaaattgcgcataggcggtaattgccaccacatcggctataccggttattacccaacaaaaccaataggtccaaccggtaaagaaaccagcccacggacccagaaggtcggcggcaaaatcgctgaaagatttatatttcagattcgataacagcaattctcccatggctcgcatgacgaaaaacagcatgaagccgatgatcatgtagacgaaaatgattgatgggccagccagactgatggttttccccgatcccataaacagcccggtgccaatagcaccaccgatggcaattaactgaatatggcggttggaaaggtttctctggaggtgttcttctggctcttgttccgattttattgctatcttggattggtctaccatctttcccattccctcttcctgtgttgtgatgtttttttgagctctaaattggctctttggattatttactctgtctgtcgaactctgtcatttggggcatgcattaatgaagatagattacatttaatatactagtaacatttttcatacaatattctccatattgcatgatggctactgtttaaatttcactcagtgatatttgttaactgcatcacaataattagaattacaccatgttccctgacaactaacaataatcgcctgcgttactcgcttaattaatgagttgtcgccatatagagcatatgataggcaaaaaaatgggatgaagtgtttgacacccacagccaacaggagaataattctcgcgttgggtcgttagctcagttggtagagcagttgactcttaatcaattggtcgcaggttcgaaccctgcacgacccaccaacgaaatcaatcaattagaattagtctttaatttaaaatctattccacgggacatatttgggacccagtgattaaatattgagtctatttttctggcatgtttatttaaatgatttggtgaaagatttgcatatttcttaaccatttaaattgattcccatccgcccatttcttttaatgcagaaataggaactccagattagactagccagcttgctcacgtatgccttaaatcacgaaatctaaaattatttattcccgctctctcatgccgaataccaagctctgttacgatcaattctcaattctcaatttccttatttccggtgttagtgacccctcggatctatttgaagcatgaatgcgaacaaagatatatttatcaagcttccctatttgttccctacgaaattttgcgacagtgtcatttagggcttagccaatagtctttctgatttgctatcttccaggttcatccaggcaaccttcctttgcatatctatctgttgccagtcccggttgattatattggagcggcctaggtcggtagaaagagctaagcgaacttcagacttcagtggctctgggcatttatttattcatctgattgcctcatagggttcaagccaacggatgcgtttgttctttggtcgagggactttgtttgaacagtcctgccttagctagccatctccactctctcggcggttctcattatcgactccattaatgaaagatgagcagcctccgccgctaaggtttttatctgtgtcgacagatcgcttctctgatttctcgtcaatccagagtaaacaggcctcttcgaacatgatttcaggcatttcgcttcgatttctttggcgtggattatggctcttacatcatgggttacttcaacaccacgtcatggagttcagacttcgctacttgctccggtgaatggaaggttgcggattcggtcactttcgttgatgactcggcaattacagtcaccagtgtaactatgatcccggcaacgagtagcggtgtagcgggttcgactgttcaattaacaccgaacgtctccccaactgctgcgacaaataaaactggcgtatggacaagctgctatgcgaccaaagcagcggttagctcaagtggcctagtcactcgcgttgccgttggcacagcgataatcacattcaccacgaatgatggcgctaaaactgcctcaagcaatatcactatcactgcgtaaatatcacaaagagcatctattggtactctttgtgatatttatttcaaagctgaacgatttaaacgaacaacatcgcgatattgatctacattaccaattatacccttatctttattactactatcgttaattgtggaaataagaagggcaatagatccataaaaaataaaatgaagattgggcttctggtattgtgtatttcatctctgtttcaaattacagcaaatgcgaatgattcaatatcaagtcgcaaattttccgcagttaatcgagcgaaatattgaaatatttccttcctgtgcttgggcgcacgataaagaaggatatgtgatgattgcttatgacattaacgtagccggaagggttgagaatgcaaagattgttgaggttgaacctaagaatctcttcgagaaatcagccttggactctatctacaaatggaagtatgagcctaataagccaaccagtggaatgggcgtcacaataaactataagaggccaaagtgaggctgtaagtatggggaccgatccgccaagagcaggtttgcgcattctagcgctcacggtcaatgaaaaagacgtgaccgcactatgagttagcggccacatttgagcaagtgcctatgtggaatagtggtcagagcttcactattttactgacgttaatctcacgccctcttgccgttgatttatttttcaccttgtctttggcaatagataaggcaacgctttcgctttcagcttcgaccgtctcagacgtagtcgcggtatttttaccaccaccttgggagtactgaattaagtcgaaatgcactctataccttgccatgtgggttcctttttaatttaagtcctaattttcaagctaatagacttcatttattcatgttttaaaacatatctagtcgttaaccagaatacagggttattactgatttaataacctgatatttcaacagtagttgcttttagggtgacatataaatggttaatttatatgcaatatgcctgcagaatttattatcgagagtattgacgctggtgttggcgtgatgattgacctgttcgaggtcgatttacagttatttggcggcgatgtgattcgctctcactcgggaactcattgctactatacgatgctatctggaaaggtcctcaatattcagcctatccaatcgtagttgaaggggggcgaagttaagtcaaaagggacatactcgtagctttcccaattaacagaagattggtcagacgatgcttttcgctctgaaatgaagatttttcacttataccttggttaaactgctgattcaacgagaaagcaaagatcacatggttaatgtaaacagaagttatacttcataattgtaaatggttattattgttatttgtgttttaaacggttatacgcgtccaatataagaaggctaaatgcaacttattttgtttaaattacggtttaataagtttgagccatggagggagagaatgactcaaacggataaaaaaatatgcactcaaatggctttaatggataatggcataaatttattttcaggtcggaatccaaccggttaaggctaagtgctttgatatataagataaaaaacagatgataaacacaataaaaaggcgagggatagagtgatgcagatgaaagtcacggaaaacgactgacggtacagtttacggattaataaagacgtcatagttggaatctcaacgttactgcagcgtgaatttaatccatagggtattgtttctttatgtgattaatccatatctacattattaatgattataggatggttacctttttggcattcatgttttcctgcctatttgaattaatttcgtcctttctgtgaacttaatcacacttatttatttgttacaaaaataacaaactaggtaataccttcactctttatcaaactaagccatactgaaaaacaacttgattttactgcggagctattctctttatgaagaacccgacgcttattcaatttttccattggtattccccaggaggaggtcaactttggcaagaggttagtgataaagcctcgcaactgagagagataggaataacaatagtctggcttccgcctgcgtataaaggtgcgtctggtggttattcagtgggctatgacacatatgatttatttgatttaggcgagtttgagcaaaaagggaatcgtgcgacaaaatatggtgatagagaggcattacaggctgcagttgagcgtttgcaagaatgcgagattcaggttctgtatgatgtggtattcaatcacaaaatgggggcggacgagaaagaaccggtaagagtatcgaatgttgaagagaataaccgtaatcaaattgctgacgaaataatagacgctcaagcttatatacgctttacgtttcccgcccgctcaggccagtattctcaatttatttgggatcagacttgttttagcgggatagattctattgaagacccatcggctaatggcatattcaagattattaatgattatggtaatgatggttggaacgatcaggtcgatgacgagttaggtaatttcgattacctgatgggggctaatatagagtttcgtaaccctgccgtggtggaggaattaaagtactggggacgttggctattggactcattaccctgtaatggtttccgtctggatgcggttaaacatattcctgcatggttctataaagagtggatagatcatgttcgggatcatgctcagcatgaccttttggttattgcagaatactggtcgcctgatattggtaaacttcagaaatatctcgagcaggtggaaggtaaacttatgttgtttgatgtggcgttacaacataagtttcatcaagcttcaaagtctggtgatagtttcgatctcgctcaaatatttgccaatacattggtggataccaatcctatgaatgcggttacgctggtggctaatcacgacacccaaccgcttcagtccctcgagtccccggtcgaaccctggtttaaacctctggcatatgcattaattttattaagggagcagggggttccttgtatttttcaccctgatctttatggtgctagttatcaggatgaaggcgacgacggggaggtgtatcaaatagatatgccgataattccagaattggagccgcttattcaggcgaggcagaaatttgctcacggcgcgcagacggaatattttgatgataataactgtattgcatttgtgcgttcaggcaatgaaaaccaacccggctgtattgttatcatgactaacggtgctgaagctgagaaaaatatttttttaggtgaagatttcaaacatcttcgattcggcgattttttaggtaatcgaaaagatatcgttattattgatgagcaggggcatggggtgtttagggttaatggtggcagtgtaagtctgtgggtacaggaagagttcctgtgagctcagaggcgttacatatgcagttaagtttgttagtagctgactaataattaagtaaatgtaatgtttatgttttcctatttgtttttattttgcccttttgtactgaaaaattactatttttagtgcttcatactttatacctatttgtgattagcttcagaaactgaaaggttataaggtaatggtatcgcttatttgtgtgataaatcgacgagttaacaaagggagtaacaaatgcgatttgaaaacaaagtggtcgttattaccggtggtggtaatgggatgggggaagctgccgcccgtcgtttctcttctgaaggtgcaattgtggtactagctgactggaatcaggacgccgctgaatcagttgcgcgctctttgccagaaggtaaagcattagcatatccaatcgatgtctctgaccatgtagccgttaaaaagatgatggacagtattgctgaaaaattcggtagaattgatgtgttactgaataatgcgggtgttcatgttgcgggtagcgttctggaaacaacggttgaagattggcgccgtattgccggagtggatattgacggggtcgtgttctgctctaaatttgcacttccttatttattgaaaaccaaaggaagtattgttaatacggcatctgtctcaggtctaggtggtgactggggtgcggcgtattactgtgctgccaaaggtgctgtcgtcaacctgactcgtgcaatggcattagatcacggtggtgatggcgtccgtattaactcggtatgcccgagtttagtaaaaacaaatatgaccaacggttggccacaagaaatccgtgataagttcaacgaacgtatcgcattaggccgcgcagctgagccagaagaagtggccgcggtgatggcgttccttgccagcgatgatgctagcttcatcaacggagcaaacattccggttgatggtggtgcgactgcatcagacggtcagcccaaaattgtctgattaaacgttcaagcgttttactctgtttacctagtctgagctgagtccgaaagtatggcgattcagctctgatggcattcctttcatcaataaaattatctctccatctacctatctgcctaagcctttcgttgctgtcttccctgtttttaacttatttttgaggtgtttcctgcgtgattctgatttttactgctaatcttttttaatcattaagctaaaaaacatcgttaaaatcgaaaaattgcaataacaagaatcaactaattcctcaaaataggggaggttacatgactcttggtattaaattttgcattttatttatttgtgtaggtttaattactatcaaatagcgcctttattagcttcatattcttatatcttttttgaataatttatgacatttaactcttggtcatccctacgtaagttaacagctacattatgagccaaggtgtacaacgatgatttttgtcattttatggtttgttattgccggattaagtgagtttttagtttggggccgccctttacttatggcgctgttatcactgatattcttagctgtagggggactatggatttataaggtgagaaagatacaggttaatactttgttaccgtcagaaggaaaaacaaagcgtatcagtaacctaaacctgatcttttccgtaggtattctggctattcatgcgattacgcttttattgtttggctaattcaatcaatgttttgtttaatttctgttcgatcatatctttaagctatttgttgatatcggttgtcatgaatatgactaattatgccaatagttccagccgagtatccgcatccatgcagctaaactccaacagattacagctgagttcagtgctagggaaaggcctgagtggtcgagaaagaagttaaagggaaatcaggtagataagatacggaattaccgcccaccttccgtaggtgatagtgagacgtaaagcttcgattgaacgtttgctacccacaatattatattgtgcgatcggagcaaaggttggaaacagcggaattaacccggcaatttagtagtttcacgttttgaataacagagcaataagaatcacgactactgcgcctaacaatgctttgattaacagactcataccaatagatgggatcagcatggtaacagtttacttgttgataattaataaattgtaactaacagacccaatgggtatttgggtctgtatcagacgcgcgtaatgttattggcggaaggcgtgtttgatttgtgcaatggtattttcgaacacttctgcctgggttttgtcttctatcagaggtaaggatctttccatcttcagaataactttacctgcgtctgcctggccaattgccttgagcatcaatgtcagcgtggttttcaggcatgtaacttcgtgagctaaagtctcaagatcggcggcagtagtgaagtctgtgttactcatagtgtctcctaatggacattgttgccgcgtggcttatcctcatattggcgtgccattgaggttaaaagcagcattttttacagttacctcattatatcacagcgtaatgaataactctgcgcacggtaattatttgttaggatacacacagatactgaatactctctacggaattcggataattctcaactgagccacataatgaatttttatgctaaataactaagaacttgtgcgtttacttaattaagttcataaagtttacggttagccatatgtttaaataatgacgatagaagactaattcaggttttttaatgtggtaatcctgtaactgtggcagagttggcatgctaggaattattcttatatgatgaatgtttgtgcagaaagtaattattcataacagtatcaggtggttgtcttttttaaattagaaaaataacttgttgtaaactatttattgcactaataattagttatttgagtagattgtgttgtaaaattcatcacttattttgggatgtattttcctttcgttgaccgctccctttaataggccgacttgccaaactaatggcggatgaaaagcgatcgcgataaaaataattctgaccaaaatagagatgtaaaattacaattattctgtattcattctttggctgaaaacaagtaatatcactgccgtaaacaaagagtgattaggttactcccttatttttttggagaattttctttgattagcgttcttcttgttgatgaccacgaactggtgcgcgcagggatacgacgcattctggaagatatcaggggtatcaaagtttcgggtgaagcgcagtgtggcgaggatgcggtaaaatggtgtcgcaataatactgttgatatcgttttgatggatatgaatatgcctggtattggtgggttggaagccacgcggaaaattctccgtttctccccagatatcaaagtcatcatgttaaccattcatacggagaatccgttaccggccaaggtgatgcaggcaggcgcaggaggatatctgagcaaaggcgctgcgccgcaagatgtgatcaatgcgattcgggccgttcattcgggtcagcgttacattgcttctgatatcgcgcaacagatggcattgagccagctagagccgcaggttgatacaccttttgcctgtctttccgagcgcgaattgcaaatcatgctaatgataactaaaggtcaaaaggtgaatgaaatctcggagcaacttcatctcagtcctaaaacagtgaatagctatcgttaccggatgtttagtaaactaaatataagtggtgatgttgaattgacccatttggcgattcgccacggtctgtttaacgcggagacattgtcaaatagtgactgaatgctttgatgcaaaagagtttttgaaaacagtaaccagccagcccggcgtctatcgtatgtatgatgccaagggtactgttatctatgttggtaaagcgaaagatttgaaaaagcgacttaccagctatttccgcacgcaggtaaatagccgcaaaaccgaaacattagttaagaacatcgctcaaattgatgtcactgttacgcatacagaaactgaggcgctgttgcttgaacataattacatcaagctttaccaacctagatataatgtgttgctgcgggatgacaaatcatacccacttatttttctcagcgcagatactcatcctcgccttgctacgtatcgcggagccaaacatgagaagggcgaatattttgggcctttccccaattcctatgctgtgcgcgaaacgctagctttgttacaaaaactttttccgattcgacagtgtgaaaacagcgtttaccgcaatcgctcccgtccttgcttacagtatcagattggtcgttgcctgggaccttgcgtgagtgggttagtcagcgatgaagaatatcaacgtcaggttgattacgttaggctatttctttccggtaaagatcaacaagtactaactcaattgatttctcgcatggaaaatgccagccaattgctgcattttgaagaggcggctcgtattcgggatcaaattcaggctgttcgacgagtcacagaaaaacagtttgtttccgggaatagcgaagatctggatgtgattggtgtcgcctttgactcggggttagcgtgtgtgcacgttctgtttattcggcaaggtaaagtgctgggaagccgcagttactttcctaaagtgccgaatggtactgagctgagcgaggtggtgcagactttcgttggtcagttttatttacagggcagtcaggcgcgaaccttaccaggggagattttgcttgattttgcattggtagaaaaagatctactggctgaatccttaagcgaacttgcgggacgaaaaattcagattcaaagccgaccgcgaggtgatagagcgcgttatcttaaactagcgcggaccaatgcggcgacggcgttagtcaccaagctatcgcaacagtcaactatccaccagcgaatgaaagcattggcggaaacgttgaagttgaatgagataaaccgcatggagtgctttgacattagccataccatgggggagcagacggttgcctcatgcgttgttttcgatgcgaatgggccggtgaagtcagagtatcggcgctacaatattaccggaattactccgggtgatgattacgcggcaatgaatcaggtgttaaaacgtcgttacggcaaagcaatagatgagcaaaaagttcccgatgttatttttatcgacggcggaaaaggccagttgggtcaggctattgaggttttttccgaactggatgtgccttggaacaaacaaaaacctttattaataggtgtagctaaagggagtgaccgtaaggctgggttggaaacgctattctttgccgcagaaggtgaggggatatcgctaccttctgattcgccagcgctgcatttgatccagcatattcgtgatgaatcgcataatcatgcaatcacgggccaccgacagagaagatcaaaagtaaaaaataccagtgcattagagctgatagaaggcgttggtccgaaacggcggcaaatactgttgaagtatatgggcggacttcaaccgttacttaacgccagcgtcgaggaaattgcaaaagtgccaagtatttcacaagcattggcagaaaagatctacaatgcattgaaacactgagcgtaatattgcaccatactcattatatccttactcgccagatagctatagaagcattatgcaattgaatataccgacttggctcaccctgtttcgtgttgcacttatcccattctttgttctggcattttacctgccattcgtttgggccccggtgttgtgtgctggcatttttgtattcgcagcagcaaccgattggttcgatggatttttagctcgccgctggaagcaaacgacccgttttggtgcgtttcttgatccagtagcggataaagtgatggttgccgtagcattggtgctggttgccgaatattatcaccaatggtggattactttaccggcagccaccatgatcgctcgtgagatcattatttcctcgctacgcgagtggatggcagaaatcggcaagcgtagcagcgttgcggtgtcctggattggtaaagtcaaaacgacggcgcaaatgatgtcattggttggtttattatggcgtccaacggcttacgtagagttggctagttttgttctactttatatcgctgcggtgctgactttctggtcaatgttccaatatttaagcgcagcctggaaagatttgctcgaaccttgatcgaagtgccgcaaaaatcagcaaacggacgttttagattgataattttattgactcattgcgtcaggtaagtagaatgcatcgcatcagacggcagcaacgaaacgccgaaagatagcaaaaaaatcagtaagttctgatgttgcgggaatagctcagttggtagagcacgaccttgccaaggtcggggtcgcgagttcgagtctcgtttcccgctccaaatttggcaggcttgcagaaatgctagtctcagcagtaaggcaatgaagaatacggcgcgttggcagagtggccatgctacggattgcaaatccgtctacctcggttcgactccgggacgcgcctccaattttcctgagcccgggtggtgaaatcggtagacacaagggatttaaaatccctcggcttatggctgtgcgggttcaagtcccgccccgggcaccatggaaaatagtataagtaaaacaaagcagtatgagtatgtcgttaaccgccgagaggcggtttttttgtttctggcgtctgccgaatttggcgaagtggcgaccaaatgactacattgtgtctacgacctttttgcccccgtttaaagccctgccaaatcagcatcagcttgcgctggataaaattctcctagaactgaattgcttcggacatctttcttgcaaccaaaggcgctgatataaccgatggcacgtcactgcgggcaaatggtcgccagtgcggtggcaatctccaaattatccagcctcggtacgcccggaatacgcggccggacgccggtcacgatctgggcggctaacagggctttcatgccggtatagcggccattctcgtctgacctgccgataatattgggagtgatttcggccgcatcgttgccggtagtcacgcgtaccacaatgttgaccagcttggtctgctcggcaatggctaacagtgatggcgccagcgtatcttttttcctggttttccccggcggcggccaatacatcggtgatcagtatcggggtattgaggggaaaggtcttagcgtcggcggtgccgaccatgccaacaatagcggtggatacggtggaaataacccgtgtgccttcgttaatttcgaggacacggacgccttggtgataatcattcatacagtcaatttttgtgaatggaggggtgaacctatggtgacgaatttgtgggtgggggtaccagatgagggatgtgtgagctgtggcacaataaaaagcgcggaatacattccaggataaaattaaagctgtatcagtctatggtgatttgtactaccttatttctgacgttactacgactctatttctgcttgtttgggactcttttcatgctcagtatttttcatgattattcgggcgctattgttaattctgcccttggtgtcttatttacatttatttttagcttctttttgagacgacgtaatgatttaagttggcaaaaatttgaggacagctcctgggataaaagaatgctcgccatctcaaaattcggtgagctttattttaaaccgaggggggattttaatagacttgaagtccagtatttatcaaagtttctgacacatagagcggaagaaaattactgttttgctgttttacagtatgtgtccctaagaaaggatctaagtgttgatgcgacattaaaggtagccagagaacactctggcttagttgatatatgccctgatggttcagcgaggatgaataagaagaaagtattgatgagtcttcttcttttaacattattctccatttccatgggatattgggttcctgtgagagctatatcccttctcgacgacgtgatgaagacatcctctaaaaatgatttattggtcgtcatccgatattgttcatggttattttccgtatacgctatttatgtggtcattaggcaattaaaagcattgcatgaatttagaaagttgattgagaaaataaacttaacaatattattaggtaagttgaaaagggcatctgcgtcttaaaaaagagtgggtaatccccacatattgatacttattgtgagggtttaaaagcgccatgtgattagatataacctatggaacacatggtttttctccggttaagcgttcaggcgctatgatgccggattgttgagcacggaacaggtgatgggcgttgtgcggaggatggcacaaacatctgagggggagagcagtaacgccgcaaaaatattattgcggcattaaaatatcaggtcaatttattgactatttttcagtaaccgaatcgttttatcttcgatgacaaatcgcttttcaaatgcagcaccaatcataacaccgccccaagcatggctgactaactcattgaccaattcgcattcagtaatcaatggcctgaaaacttcggtacttacttccagatgtttaatccctgtgcctttcttggagttggtaggtttaaagcctgtccccgttgaaaagtcattatcttctggagaagaccaaccaataaaccaagttccatgaatgatttcgtttctacgttcaatcaggttagtcacccgattattgattttagctaatatgtttttctgttcctcatttagctctgcgctaaccataagaacggaatgaaaagcctttgatagtggataagctgtcagctcagccgtaagggcatgggtgatttgttggttctgcaacccgtggcgcccggatagcgctacaatacctgttctcatagcaaaacaaactaattcaaacttggctgtaaattcgcccaccaaagcatattgctcctgggtttgtgctaaccttctggcttcccgctcttgatctgacatcagtctctataccatttatttaaatcatttattcgcacagaaacgattgaatttctggcaaccgtgccaaacaatataaacgttattacagtgctagcacatgctcatctggtgtttattcagattgtttggtgccccaacccatatcgccaaacctcattagacagcgtagccatatccgccagtacgctggtgacggtctccgtcttcaacgtttacagcagaaccagactgtcatttttatcattactatgagccacttacagaattctctcgacaggctgcgccgctgttttcagtcgtgagatcaatcgccgtcagcgtcacgcggggttcccagcgcatgactgcgccatacaccgccgccatcattttgagccgtaaggcggggttctgcggctgatcaatcagcgtggacagcagcgaaccgtattcccgacgcatcactctggagccttgcggcgtgattaaaatatcgctgatagactggcgaatgtgagccatatcggtaatggctttacctgtctgcgcattcatgccgagataagtcattgcggccccccggaggaatcaccgccacctttgacgccgccgtgttgatgggtgtgaaccacaatgccgtttgaggtcagattgccaccggaatggttaaagttgcctcgcgcctcaccgccttcttcaatcagaagggttcgggtaatcaggtgttgagtacatttcaccactggcgtggtgagggtgatcgaggtttcggccacgatattggcggttttcatgccggtaatggctaaatgacgggttgtaggttcatattcaaatctggccccatcgggaaatgtcactacgatggcatccgctgaagccgagggtgcagggttgctatcggaaaacaccgcgggcaacacaaaagcggtggtgagttcgccgccgatactgaggataatcacctgttcccccaccgagggcgcagcccaaaagcgcacccgaccggcgcggggcgtcagccagttcaaccagtcggtttctagctcgcccatttttacccgacataaacctttgaccgtatccacttcggatacaatgccgatgcggatcagattcgccagggcgcgtttaagtgctgcaataagcgttttcattcagccagtgtgccgcgtgcgggcgcgactggcatgtgataggggttgtgtgagggatggcacaaagaattaactgcaaaaagaataaacgcgtgtattaaaggttaatcaaaatgtgaacaatatgggggttcggtaatacatcaggtgcatctaatgactaaaccctgtaacctccctacgttttattattttaactattccgctttggtacaacaactacactcatgtatttgttaacttcacgaatgaatagatcaatagcaatgcaccctaaattaaaagcgtctttgggcatttttcggggtgcggcgataaactccatattgaccgcaggtgcattggcaagccactcagcttatgcctccagagagctgagagaacaaaacccaagattatattggcgtttacgttctatgggcgaactggacatattgtattttttaattaaagattcagtgtctggctatgtggaggccagcggtatgcaagagcagggacgagatgatgaatacaggaggataatagataatgtcatcaaccaactcaacggttaaaaaaatcttagtcggttttctatattatctttcttatatggcggcaaataccgttgctatgatcgcaatagtattgatggttacatcatttttctattttgaacattggtatgtcgccatattagcttgcgtgggtatttttgcggtttaccactttatattgtatttattcccgcaaagaccagattaataactacttcgcaatatgccccaacgccagaccccaatccactctacatcgccgtcggttagccctagcaactggcggcgttcatattttaccgtcggcccgttgcggctgattttatcccgcaggccgtagtgatggactctgacagatgtttggtacaatgtgcgcgcaatgctatgggcggtataaatatgattatctcagcctggttggagtgtcattaaaagtggatctgcatactaagaacgacaattccggggagaataacgccgccttctacgccaaaagagtcattaaaatcatattggagggcgtgataaatatagggtgcaaagcctactccaacggcgtcctttatatttttataaatcccctcatcgccacaatgactgaattgagaaaagaaaaactctcctgcatatgcatacccgcctttgaaggtccaatgatccttttcccaccagtcttttcgcacgcctagcaacatacatctgttggaaaaactattgactaacgttccaacagataaactgtaatctgactgggcatttaactttctctcaacggcaatatactgattatcaaagtattgcgtatagtcagttttgggttcatatgcatgaaatataaatgcccccggattcaccgagtaaagtttgtcatttgatgcgatagcactggctgaaatagcgatcaaatcggtggcgatagcagctctcattatttgtacctacatgtgttcgtgtcgtcacgctccgcgatggcttgtttgtcgaagcccaagcttgaaacggtgtacagttcgaacttaatcgtagcagcctgcttttgttccggcgttaatgatggatagataaacgatttcaatttttgcctgttaaccaaatagggattttttatttaaagagaacggtgatttacagttcgcctattcggtctgcttattcagataaagttgcccggctttctgatgttttccatgtggttaacaagatgccttcggccatcaatcaagaatgcgatgaacataatgatgagcttgttacctgaatttgctgaggtttttatgcacgccagagttgttacaacataggaatctgatttttgttgaaaaataccctcagcgttttatttacaccgcattgacttttcccgggctggtgttaacactttagtgatgcttatgaagtaaactcacttatttaaacgaatatcaaaatcaaaggtaaaaaatgaaatacatgacattagttttggctgtgaccgtcctgttttctgcttcatcctatgctgccaaacagatcactcgtcaagagtctgctggttatacaaaaataggggagctgtcctttaagcagtcaggtataccaaccgtaggtcataaagagctttcaaaaaaggttaatcaaaaatgtgaggaaatgggtaatgtgaaagccgataattgctattacttcattttggataaaaccggcaacgaatcaaaccatgaaaacgttgatgtcgaaattttcaaaaaataacgtttaaggctctccttagctctgcatcatattcatacctgatacagggtttgaattatgtcgaatgaagaacgtatccgtattgtgaggtgaggattggcatgataaagaacccggcattcttgttatcgctatccattggctttttatgttcagcacaggcctcagcaaaagttattgtcgaagaaggtctgagcctgtatagccatacggctatgatgactatgagtctacagctgcacgccttacggatattgcggctcggaatggcttgtgggtgaatgttttattggtgcagccccttggttccatggtcctggtgattttcacggccacgtagataaccggtttgatccccacaatggctatcatggcgcattccctaagcgcggagatgcacctttccatcacttcagagggaacgaggttcgcaatagccgtgttgaatatcgccgctcgtagcagaaaatcttttctcgggttatttatcgtacttttagcttaaggaaataccaatgaataaatttatcttttgtgtttttctctgcgcactttctggatgttccggcgatgatcgatcggaatggggcaaggcacccgctgagcctttggatgcgcaaacttgcatggatgatatcagcgatgccaatagcgattgcgcgcattctgtcgatccaaaattcaattaatatgaatgcgttcagataataattaattaaagagagacctgtgtctctcttagtctaccaaataaaatcaatctgcttttaattgtgtctgtgtcaatgccattgttgaagtcgtgcgtttatattcaattattgatttattcaggttaggaggggcagctttaggtattgatgcttactgggctattttcaggaatcaagtaagtataagggaaaaggcggtcatcgttctttctattaattttatcagtgatccctgatagttattttcgaaaacctgtcaggtatgggtaaataatcgggttatcttttctggtgaaaatttcttccccttaccaatcaatatactctcccaaatagccatgatgaagctactccgaatagggtgtaaatttcaacctttccttaatgatagaagagatcaatctggtcgcgaggaaactgtatctttcttgcggttttcgctttatcggaaaactcgaaaaagataaatattgtgatttcctgagtctcaataacgattgagcaacggtggttccgacaaacatatccttcttctgtgatgctctctgaacatgtcttattttagtgtcttggcgctgtgtattttctcaagaaccgaaaggggaattctatcgcttcagtggcagatagcagcgggcttcaagccattatctacgcaattattgctgccggcgaacgctagccaggggataatccagcgggaataacttggatgaaacttaacatattcgcaaatttgatgtgttttactgagaatccagatcgataggcaaaagtgacagtcatcagcgtatagcaatgaggttcaaggcattcaaagggacttgagctcactcgttgtaacctgtttctctctgggatttaaaacaaaaaacccttacacgaggtaagggttgccaaatggccaacaccagggaaagttaagatgattttattgattataaggctattgaatcatattaatgtgattcatgtcacgcatttattgataacttaaataaattcaatacattaatttgaagattaataattatacttaagtcaaattggctgtattcattatttaatttaatgtttatattgttttaatataaatagtaaatcatcgaaaatttgtcagatgccgcttattttcttcgcatcatccctgaaaaaatggttgggataggtcttatccttatcggcatctttaacgttctgagatgtcacaaaaaccccgatacaccgtgattcttgtgacaatcggtctttaaggtttgtcatcgtcagttaacgaagaatattatttagtgtttttattcaataggttatagggattgcaacaatgagggatacgagggtttatactctgtgggttgttttactttcttatcacctttcgccgagcgaagcagagtcatttatccccgccgctctcaactgaaagtggtattggccgattctccaaaagattgtgccaaagcggccatgacggacatcggcattattggcgtggtaaaaatttggtgtaatgccgaacgttgcattggttgcggtgcctgtgtgacgtactggattcctccctaaatttagcttcatgctgaaatgagggagggctccatttcatttttttagacttcatgttaagaaaatggattaaaaacgggcgcttaacccaatgttatacataaattgctcgccgctgctcaggccggtggtctgcgatatggaggcaaacgaggccacgttatccgtgagcggcacgttggcaccaagagtgagattcacccagttcttatcctgtctggcgctgtcgcggacaaaatgagtttgagttgatttcaggcccccaccgcttcgataaacgtcatccccaaactgatgttggtaattcacttcggcataagggttaaataaggaaaatttgccatccagccgccagcccaaagatccaatttgcgaatgataagtttgatcgctgaagcgcatggccgtactgtcgttaccattttcgctatatcccgacacattgctgtaatccagcgcaaattgcgccatcgggccagtggtcaggtaagtggtgatcggaatattatatccggtagtgaatctggctccccactgtttgccatcggtattaccggtttcagttcgggttaatgtgccgatctgcatactgcgacgtatatcatcgtaattcatgctggcgtagtgtacgtcggcattcatccaggcataatccgcgaattccagagcgctgaaggctgaaagcagcaaaccacgcgccttataatcgtaacggctggaaggccgttgattatcattcgatcccgcaattaatgcgccaatcagccaattttcggtcaactgataatctatacccaaggtcagattatgagtagtggcattgccatctccggcggcaatgttggctgaataatcataatgctgcccggcataaccgccaaatacgccaaatgagtcctgcggatttttatgagtgcgcaattgctggaaacggctgtccagggtagctcgagtgtcgcgagccatcgccgccgtggcttgtgtcagcgcagcggcttgcgcgggggcatcaagtaccgcttgcatataatcggctatcatctgatgcgcctgcgggcttgggtgaaaatgatcggagaaaaggtaggattggcccggggcaaagccagcctgacccgaagtacaaaccgctgaagaaacgcctatcgggcagggcattactgccgtattggtaaacccgaacagattcggattactaataatttcaccgaatagtttattcacatcgacgcggacaatattgccgctaccttgggcgagcaaagcgtcctcactattattataaaaatctgtgagttgcccggccagagcgctttgatcatcaaaggcagctatgagctgaacggcaatcccttgctgtacttgcggaatagagctgattcgttcagaggcggcggtgagtgcctgatgaatagcctgtctgcgggaggggttatcaggcgtagtcagggcatttagcgtgctgaaagcggcctgtagagcgccgggtattgctgaaggctgtacggcagccaatccctgttgaataaccagttccattaacattggggtagcgccgatattgggcacggtcggaacgataaccgtattggctccggcattgagtaaagcctgtacctgcgttgcggcagcggcagcgctgttatacgccacgctgggtgcgctggccgggtttgaggccgccgcagcggccaaatcgttaccgcctacccaatgcagatacaggccgttactgtcggcctgaccgttcactcgctgcaagtaactttgtacttgattctgcgtattgtaggcggggttgagtgctggcaccgcaacggcgccgccagcggcgtagttaaacccgcctttatccgacgcgactaatgtcatacctgcatttttcgccaaaatctcgtcgtataaataatgctggttgctatcgtaggtgaatctgccgttatttccggtatcactcagactgtcgccgaaaacataaacattgtcgtaagcgaatgtagggccagtggcgcaaaaaaataaagcaatggccagtgcatccatgcgatacggatacattattttgataggcatatatcaactcccttgaacctaaatatgaaagaggaaactcttgatggtcgttccggatgtaacaatcgctacctaaatattgtcggtttcctgatttagtcaaggcgaccggatatattcctgcctgcaggcccatgaatcaaaattgaattatggtcagtaagctgccacgaactgggttttggctacgctgaaaatataagcaggcataataaagggggaaactggcaaagtagaacaaacctcaatataatcgtttaattaattcactataaatatattaagggggattgctatgttgactcgtgaattgtttcttttttcacccgtcctcagtcatcgcaactgctcaagcgttaccggtatcgtgctgcgataaccagcttgagcgaagctaactgacaatctgaaaacttccctccggcttactgcattgcgagtgcgtccgacggctgaggcttcggtactgttccaaacagcgtttgcaagaatggcacgatctagcaccggtttacgatattttgaccgacaaacctgcgccagccgctacggctccggttgagacaaaactggaaagcattgcgcagcaggaaactgaagaagaatacttactggcgatgttgctgggtctggaaagcaaacttgaaggcgatctggcgcgtaaacccaagcatcaaaaaccagagttacagcgccagtggcagcatgaaattgtgcagttaagtagacagctaggtttggtttaaacggtaagatgagtattcaggccgtagaaatgcggcccgtttatcgggtatagaatttgagattaatagcatggcgcatttggttttattgaggtgataatcgctgaccagtaaatattatctttaaaccaataggaaaaaacactaaataaacagcctctgaaaataatctcttcgtatatcggaacaataaatatcagtaataacggatttatgattgaaatatacccacgatgtgaaacttgatccgtcatccacttttctgattttgttactcccagcagataaggtctaacgaactgaatggcaagtatgacgagcagcaatatcagaaaaaggcgataaaagatttccttttccaaagccgtcacgttttctaaagaaaaactaatatgaaggaacgataatgctgagctctaataggtacattatagggagcagcagcccttgtctcagcaattcctgactgtgtgcgatgaacaaagggatacaggtgatacccaacatcaagaagaacatcgagaagtagcctgaaactgccttggttttttcagtaaactcattatcggccatgcaatacccctatattctgttcgacgaatgagtctctacgcacttcacgtcacagtgtcttttgagttgaacgtagcctttgattgaaatccgatacgcataatccgaagagtcagatgcaggtggtttgtaaaatctgcctttcgttaggaaaggcagggagttctcttttaacgtctctttaattcccgcattttctgcctttagcggaaaacacggctacggtgccatgtaattgcacgtccacctgtttgaaatgtgtggagagcaccgagtgtaaattatctaacgaatcctgataattactaaaaattcctttttggttatagaccgacatcagtttgcgggcaaaggcattatgttccacaccttcaccaagaattgttgcaccacaaacaacaccatcgtcctttattgccgacgcggcgagtgcaatagcgggcgctttctctgacatattaccgggcaggcaatgaagcagataaaataaagaaaccgagtcgaactgattattcagatgctcaggtaacggttgaaaaacatcatgcaacacgcattctgaaatacgatgcagtccgacgcgatttttagacgcttcaagactgtttgggttgaggtccaacagagtaatattctgtgagcctcggggcgtattggccaggtaataaccggttccgacgccaatatccaagtgtttttttcccatgtgttgctgtaaatgaggtaataaaatatctttggtactgcaacgccaggcgtatttattcgatatgtttagtacccaccaatcatagagtttcagtgacagtggtgtataaacctgagcacctttagcgtttttggcattcatccgtaaatccttttcttatgtttttattcaacaatcaattgctaaaataaccaatttttatcttggaattcaatatacaggtgttaaatttccacattctcttattaggtagttagggggattaaaacaggataaagagggttgcattagatttatgaatggaaatcgggcggccttacttaaacgcgcttaggggaaatttgttaagggcgcacgcagatgcgataagggatacctgagttaattaaaccgcccctatcgataacgatgattcactagcgaacgcaccaattttccttacacttcaatcgcacttagatgttactctttattcagttaaagcgatgggagctggcaagtgaaaaagtcaccgtttacgctattagttgcactttgtgccgttagcgtatttttcttaatcggcgggtgtgagaaaagaaactcctattacttgatgcgataaagaatgacacccgagttcaaatattaaactgcgataaatattcggatgaaaacggtgatgcgccagccacgcaaaaatacagcgtagagaaaagcttattcgggcaaactcccttgatttccggcagtgaaattacctgcgaattaggtaaggatgtttcagaaaaacagctggcacgcgttatggcgatcgagaatggtgtgattaacggcattgactatacgcttttccattctgatgcctcagggagcgttgggcagaataacgctgaatggcaggtggtgtgtgaaaaagatgcaatgacagatgcacaaattgtgcagcgttgtgcagcgccgaaaaccacgatttatatctttataagaatgacttgggttatttggtttccgtggaaaaaccggctatagcaattcggggcctgatactcaggctcgacgccgaaaatccattgttcactaatactgaccagtttgatgcaaaacagtcgaggacaattatttctgctctgcgtaatggcacaaaattagtttatcgatttaaaaaacgcccaggtgatatctctgaggatgtttacgtcaacaccaataatattgagcaagcgttgctgttgctgaataaagcctatgctgctttgtgacgggcgagctaatcatttgattcgggccgtgtgaatacgcggccttttttatatggggtgtctgacatttatttactgagtgctaaacgaattaacgggtaaggtcgcccctgactgtctaattcagagtggccggtgatttggaaacccaaacgcggataaaaccttctgcccgcgtattttgcgcattcacgtcggtcgttattattgaatatagcgccacggcgtaatcaattattttacgaccaacgccgactccccgatatttcggatcgataaataaaacttccagctgaaattagttaaatagcataaatccgatagacccatcttggttatcgacccaagtaacaagggggcagcgggaagcagtgtagccgcgttttgccgttgaacgagagcttcaatctggtgcatgacaggcgctgccttttcccacttcacagttaaccattactgctcggtgcgctcatcatgctggaaaatgcgttagcccagcgatgcgtatttttcttgaaagtagacatcaggacttacccgcgacgctatgcgccaatgccgaacggctagcggtggctggttaggcgagtttattttttgttattttatgagcggctttagcgttatttccccgaatccatacattatacattcttctgaattcaggccgcttcccgctaaattatcttttgtgagcgaaggtgagtctgaatcaggtcgccccgcgttaagaattctactattttctctttttattgatgaaattcctatagtttttctatgaaaatcagcatttcgtatttcagactcgttgcaggttaatgtgcggtatcagccatttctttacttatcccaataattttgtacggatttttcgcaattcctttcgtagctgctattttattttttataaatcaataaattaaacttatttcgcaaagctaaaaaatgatggttttgggaggttcatcacaatgcgaacccgaagaagtgtgaagaatgtcaatctgaaaggtcaatgagagacgattaccccaaatagtggattactgccttatctggcaactccgtatactttcgacaaccagagacaatggatgtgggctaaggctcgcgatgacgtacagataaagggaattttaccattgcaactggcatatcaataacttgtgtcttttgaacatcaaaaggtgttgggtatggaaaagaaaaaaatttatctgttttgttctgccggtatgtccacctcgctgctggtatccaaaatgaaggcgcaagcggagaagtatgaagttccggtggtgattaacgcctatccggaagcgctggcatcagaaaaaggcccagaggccgatgtgatcttgttagggccacaaatcagctacatgttgggtgaaatcgaaaaaatgttcccgcacaaacccgttgaagttatcgacgcgcagctctacggcaaagtcgatggtttaggggtattaaaagctgccgtggccgctataaaaaaagcaaaacaataataggggattgtcgtgagccaatttattgcttctctggaaaaagtcatcttaccctttgccgttagaataggcagacaacagcatatcaacgccatcaagaatgggtttatcaggctgatgccgttaaccctgaccggggcgatgtttgttctgatcaacaacgtattcttaagtttcggcgacggctcgttcttctactcaatgggggtgcgtttagacgccgataccataaccatgctgaatggttggaaaggcattggcggtaacgtttataacggtacccttggtatcatgtcgttaatgacgccgttctttatcagtatggcgctggccgaagagaaaaaggtcgatcctctggccgctgcgctgctggcggttgcagcctttatgaccgttacgccgtacagcgtgggtgaagcctatgccgttggcgcaaactggctgggcggtgccaatatcatttccggtattattatcgggctggtggtagctgaactctttacctttatcattcgtcgtaactgggttatcagcctgccagacagcgtgcctacctcggtttcgcgctcattctctgcagttattcctggttttatcatcctgtctatcatgggtgtgattgcatatttcctcgcccaatatggcaccaacttccatcaggtgattatcgatagtatctcggcgccgctgtctaaaatgggcaatgtagtcggctgggtgtacgtcatgttctcctccctgctgtggttcttcggggtgcacggcgccatggcgctgtccgcgctggaaagcggcattatgatgccgttcgcactggaaaacgttgcaacctatacccaatacggttcggtagatgccgcgctggctgcgggtaaagagttccatatgtgggccaaacctttcgtcgattcctacattttcctcggcggaaccggtgcgactctgggtctgattattgccatttttattgcttcccgtcgtgaagattaccgccaggttgcgaaactggcagctccagcaagtattttccagatcaatgaaccaatcttgttcggtctgccggtcattatgaacccactgctgtttatcccgttcatcatgattcagccgatattggcgattattacttccgtggcttattacagcggttttatcccgccaatcaccaacattgcgccatggacaatgcctgccggtttaggtgccttcttcaataccaacggcagcattgcggcgttactgctcagtttgtttaacctgggggtagcgacattggtttatctgccgttcgtgattattgctaacaaggcgcagggcgagattgaccgtgaagttgaaagcgaagaagaaatcgcaaacagcctgaaattctaataattacactttgtttgagctgcactctgtttatgacgtaaaggtttgggagctggaatgaaatatcaattttccgatgatttttggtggggaagtgccacctcggcaacgcagtccgaaggggcggcgttacgggagggtaaaagcaagaatatcttcgattactggtatgagatttccccggagcgttttcatgacttagttggtccagaaaatacttcgacattttacgataactataagcaggatattttgttgttaaaggcgctggggcataacacgttcagaacgtctatttcctggtcccgattgatccccgacggtgacggcgagctgaatcctcaggccgtcgccttttataacggggtgatagatactttactggcaaacggcattaagccttttattaacctctaccactttgacatgccgttatgcctgcaagagcgaggggggtgggaaaaccgagtcgtagtggaggcttatgcccgttatgccgaagcctgttttaagttgtttggcgatagagttaaacactggtttaccttcaatgagcctattgtgccggttgaagccggttatctgaatgacttgcattacccttgcgtggtggattttaagcgagcggtgacggtggcttaccatagcgtattggctcatgccaaagcggtggggcgctaccgcagcgcggagcaaaacgggacaattggcatcattttgaatctgagcccgacttatccgcgttcagatagcgccgaagatcgtgcggcggcgtatcatgccgatctgttgcttaatcgcagtttcctcgatccagtaacgaaaggcgcttatcctgctgatttggtggaattattacgccagcatgatttattgcctcgcactgagccggaagacgctcagctgattgcctgtggaacggtggatgtgcttggggtgaattattaccagccgaggcgtatccaggctaaagacgttccggtttctgccgggcaggtaaaaaccccagaagatttatttagtttttatgcgatgccgggtcgtaagattaatccccatcgcggctgggaaatttatgaaaaagggctgtatgacattctgaaagacctacaggaaaattacggcaatattccctgctatatttcagagaatggaatgggcgtggagggcgaggagcagtttatggactcgaccggaatgattaatgatgactaccgaattgattttattcgcgaacatttaacctggctgcataaagctctacaggaaggtagcaattgtaaaggctaccatttgtggacctttatcgactgttggtcgtggcttaatgcctataagaatcgttatggattggttcggctgaatagggcagaccaaacccgtgaactgaaaaaaagtggttattggtttgcaaatgtcgcaaggcaaaacggctttaactgacggagtaatatcatgtttgatttagattctatcgttgataatgaagaaaccagcagtgagttggaagacgtcgttatggggctgattatcaacgcgggtcaggcgcgcagcctggcttacaaagcgttaaagctggctaaaaccggtgactttgctcaggctgaagaaatgatggctcagtcccgattggcacttaatgaggcgcatttggtgcagacccaactgattgaagcagatcagggcgaagggaaaaccaaagtcacgctcgtactggttcacgctcaggatcatttaatgaatgctatgctggccagagagttaattgccgaattgatcgaattacaccaacgagttggttgatgttgatgttggcactttgtccgttttgaatattaaaatgacggtgaataaaatggatataagattagtacgtgaaaaagatctttttaacgacaaggaattccatctatttatttacaataaaacggaaagtgccacaggtttacatcggcatgattattatgaatatacgctgatattgacgggaatgtgttatcaggaaattaacggtaaacgggtgtttttagagcgcggagacgtggtttttatccccgtagggtctcaccatcaaagtttttatgagtttggcgtgactcgcattctcaacgttggtatcagcaaagcgtttttcgagcagcattataaacatattttatcccgcagttttgtggcttctcaggcctatcgtattaaaggcgattttctttcctatatcgaatcagcgatttctgcggctcacgtacaggaagatgaaataacggagttgttggaattactgacattctatgtcacaaaccgcattagccattataaagagaccgctcccagcgatgatattccccagtggctaaaaaataccgttgataagatgcatgataattcgcagtttggggaaagggcgctgatcaatatggtcgaactttctggcaaaactcaggaatatctcactcgcgcgacccgacgttattaccaaaaaacgcccatgcaaattatcaatgaaattagaatcaattttgccaaaacccagcttgaagtgactaatgacttggtttccgatatcgcttttgaagcgggttacagcgacaccacattatttatcaaaaacttcaagaagctcacctcttttacgccgggtaactatcgtaagaaattctatggcgttgctgagagtttatcccactaatttttggctgacgctggcgacagcgggctacgcagaaaggtattactcatggggaagttacttattattaatgctgatgatttcgggctaagcaaagggcagagctacggtattatcgaagcttttcgccacggagtcgtttcttctaccacggcaatggtgaacggcacagcaattgatcacgctgcggaattgagtcgggaaaatcctgatttaccggtggggttacattttgtcctcacttacggccgcccactcactgagatgccttctttagttgatgccaagggcgaactgaataaatctctgtggcagcacgcggaggccggcacgttgaatctggatgaaattgccggagagctagttagccaatttgataagttcgttgctctatttggccgcccgccaagccatatcgacagccatcatcacgttcatatgttgccgcagatttatccacgggttgccgcttttgcccgcgagcgaaatctatcgctgcgtattgaccgtcattatgcgcagcagcaaaaaatcgcgttgggtgattctcgcagcagccagtggtttgaggacggtttctatggtgaggaaatatcggaacagctatttttacaattgttggataaagccaatgagagaggcgtgaattccgttgagtttatgtgtcatccggcctttatagataaaatcctaatgaccagtagctattgttatccgcgtttaactgaattagaagtattaacctctcccacactaaaacaagccattgcgcagcgcggttaccgattaggttcttttcaggattgctaacgttcgcctatttatctgataaacatcctagtaaaacggcccaaccagggccgtttagttgagaataaataactctcaaaggcttcctggtacttcagatgttcttattcattatgcttcagctgcgactcactttattgagtaatttatggcaaccgcttttttccattttaatgatatgggtagcatcggtggtggcatcttcatagcttttacgtaattcctccagatcacagccactcggatgattgccattgctggaagaaacttgaaagggaagtatattctggttgcttaacatggttgctcccgtgttgacactcaggacgcacagcagaggcaatatgatgaattttgaatttctcaacattgatcttccctacggagtttcttaatcatgggtctcagaccatactctctgaagattgtattagtgagagtaaaggtaaatatgattaagctgagggtaataaattatagatttttcctctgaaacggcttaattattgacaatataagatatagtcaagtgcgtgactttctccgcgggcacagatacatgctctagcgctaaaagcattgtgctataaagtatccgatgccagataataggaatatttctatggcaaatagcagaatcatcaggatattgatgttcgccgtagccattttgaatcgttcaaaaaaaatactatacatggtgatgaatctttaaattggaaacgctattaatcttgctaagcataagcttatcctgatagacgcagcgtctatcgctaccgatttcagacgtgatatttccttcggcataaacttgtttcagcaacgctgggtaggccgtaatcagccgcgatgtatttaacatggctgaaagtctggacgatagctctctggcgatattgattgccggatgaactgcttctgaattttgctgcgtgagttccgctaatcctccgcgtaaaaaccagtagtgaagttcggtgctattacgaaatttaagcttagccattgccgtacgtttatgattgctcacggttttaacactaatacgtaacatattggctatactgcaatttgtcatgcccagcgctaatgactctaagacttcgcgctcgcggcgggtcaatgcttccgtaatgggtttaatgccgataagagcattccgggactgtattgaggaaaacattggctttatcaaattcactaatttatcaactgataaattacgtgaaatgactctaatattttcctgattgatagtgagtgagtgatgattaacgctatccggattttggatcaaaaagaaccgagtgttagaggtctccgggttagcggcaatctccgataataatcctgactctgatagtgaacttccacaaaaaatgatgttggcacgataacggtagtaaatgtcgttagtaaaaaatacacgtatatttaatcgggagaaaaaaacaataagcacctgacgtaaaccttccgcatagtacttatctttctcgataatcaatattgtcagggagttattcccagaaaatcgattgtttctcgtggcgtgattattaatgacgctggattccatgcgtagtctatcctatgtggcaataatatttattattatttttctgaaggttgtatttattttattttctgctgtaaaacaaaaatatcaaatatcgctcaaataagtttaatttttcaatcgtcagtcatcatatttcaattatgttctcatttcttttcaatcattattgatctctcgagtgcggctattatgagctgtcatgggttttattataaatcttcatttttcatagggaaaagcaagaaaccttttataaatccttaagttatttaggaaagtccactcgaatatgaaacataatattaaaggaatttttattccactaacatcgcgctttgcgatgccggttgcttggttaaatattgtcatacagattctttttcctctggcgggtgcatttacgccagtcatggctgcaaaagcagataatcgctcgatgctaaccccgccctcggagaaaaatgtaatacctttaactaaggtatatacgttagctaagggggaaactccatcaagcgtggcaaaaaagtatggtattagcctggatgagttacgccagctaaaccgccatcgactctttttacaggagtttgataaattgcctgaaggaacattgttgaatgtgccgaataaaattccggcaaaaacaactgaaaccaatataggagagttgaataaacaacagattgaaaaggaaaataaatttgccagttgggcttcgcaatctggccgctttcttcaaaataatcctaatggcgatgcagcggcaaatcttgcgttaggtgcagcaaccagcaaagctaaccaagaagtgcagcaatggttaagtcgttttggtaccgcgcgcgtacagctaaatctggataaaagtttttctttgcaaaactcacagattgatttgcttattccactaaaagatcgaaaagacacgctgtggtttagtcagagtagtttgcatcgtactgatagccggactcaggccaatttggggctgggaattcgctattttcagcctagctacatggtgggtacaaatagctttctggattatgacttatcccgcgatcatgctcgcttaggctggggggtggaatattggcgcgatttcctaaagttaggtgccaatacgtattggcgcctaactaactggaaagattctaaagattttgtcgattacgaagaacgtccggcaaacggttgggatatacgcgccgaaggatatttacctgcttacccgcagctgggcgctaaattaacctatgaacaatattacggcgatgaggtcggattatttggcaaagataaacgccagagcaaccctcatgctattaccgctggcgttaattacacgccgtttcctttattaacccttagcacggaacaacgtcagggtaaatccggcgaaaatgatacccgatttggaatccaactaacctatcagccaggaataccctggagtcagcaattggacggcgcggcagtggccgttcgtcgtagtctggctggaagccgctatgaccttattgaacgtaacaataatattgttctggaatatcgcaaaaaagacgtggtgttcctcacgttgactaataacgccagcggctatgccggtgaacaaaaatcactgggcgtatccgtgaatgcaaaatacggattggatcgtattgaatgggacagcgccgcgctggtgatgaacggcggcagccttgttcaagaggccgccgatagattcagcgtgatattaccgaattatcaacccggtggacgcgccgcgaatacctataatttaagcgccgttgcttacgataaaaaaggaaacgcttcatcccgcgcgcaaactgagattgtggtgacggaagccgccgtcagcaccttaaacagcacctttagtccagcagaaagtcagctaactgccgatgggcagcagactgtcgatctcgtgttgaatattcgcgataaagataatcagccagttgatgtgcaagatactgagatcaatctggatattagcagtcaggcgagaagtaaagtcagcactcaggttacgccatttactcgcgtggatgtggggcaatatcgcgcaacggtgacggcaggaactcaaaccgagcgagtcatcttaacgccttcgacgcgcaatataacattggctgaggccaaggttacgctggtggccggggatgcggatatcggacattccactttgacggtatcacctgaaacaattgtggctgacggttctactcacagcacgctgacctttaccgctaaagatagccatgacaatttggttagcggcttaaccgatgtgagttttgctatcagtgggctgaatgataatagcagcctggtggtaggcaaagtggcagagagccacggggtttatcgcgcaacattgcagggaaccgaagcgggcgcggccagtttgacaccggtcattaacggtgtggcgctcggtggattggcggcgttgctcacacttaccgccgataacggaacggcgcagattaccgatggcaatttgtgggtgacctccgacggcgcgttggcaaatgatattgaaaccaatggtgttagcgtcagagttaccgatgcatcgggtaatgtagtaccaaatcacgaggtcacgtttagcaccagtaacgggcagatccttacgccgcatgtcataactgatgtgaatggattggcatcgacgctgctgaccagcactctctctgggactattcctgtcaccgcgacggtcaacgggcaatcgaaatctgtcgatacccagtttgtcggtgatctatcgacctcttttattaccgaccttacgccatcggtgacgcaggccgtggctgatggcagcacgaaggtgatatatcgagcgacggtaaaagatgaaaaggggaatactttacctaacgtaccggtgtattgggagcgcgacaatactcaggttatgttgagtgccgctcgcagtgaaaccgatgatcagggcatcgcgcaaattgaggcttccagtctgaaagcgggggaggtgattgtcagtgctcaaagtcggctttctcgtaaatcggcaacctcggtttcctttatcgccgatatgactcaggccaagatcgatcggcttagcgcggataaaaatatcttagtggcagataatacggaaaccgccaccttgacggtcggcatcactgacaagaatgacaatattctgactggtgtaccggtgagctggcagattattgaaggcagcggcacgatcattcccgttgagtcagttaccgatacgcaagggctggcgaccgcctctctaaatacccgtcagtctggcgtattaaaagcgagcgtaagtctgaataatggtgattcgcgcaatattacgctgaatgctgtggccgataaccgcacggcaaaagtgttattgacggcggaaaataacaaagactcggccattgcgaatgacgtcgattctgttgtgctgcttgccgaggttaaagatgccgaaggtaacgccattattgatttgccagtcacctggcgcagttcgattaattcagtaaatcaatccgtgtccaacaccgatatcacgggtgttgcgcggatgacgctaaaaggcaaccaggccggagatgcgcaggtaacggcgctactgttcaatggcgaacaggcggataaaagcgtcaggtttgaccctacagcggcagaaattgggaacagccaattgagcacatcgccacaaactatcgttgcagatggcgttgccaagtcgctggccacattgatattgcgtgataccaacggtaatccggtatcggggcaaagtgtgagattcagcgcggaaaacggttccgatatttctttcgtcaatcaactcgaaaaaggtcagggtgtttatcaggtcgaggtgataggaacgcgtcagggaacgcatactttaacggctcatatcgatggagcaaatccatttaacaagagtattgatctggggctggttgccaatgcttcagatgtacggattaagtcggtaaccgttgctcgttcgcaggccaatgctgacggcaacgattcagtggaaataacggctcaggttgaagacagccaccaaaataccgcgctggaaaacgtggcggtaggctggaaaaccaatctgggagaattaatacggccggttagccagactaataaacaaggggttgcagtgatttcgctgaccagtaccgaagccggaaatgcgcaaattgccgggctattaggttacggtcaggaagaaaatgccgacaaactggttacatttgtgaccggaatggtatccgatgacaaatcaaccttctcgttgtcaccgacggtcattactgccaatggtaacgatagcgccacgctgctggtgactgcgcgggatgctcaggggaatttgttaactggattgcagaaagagatcgtgctttcttctccggagggcatcaccttaaagacctcggcatttactgaggtttccaccggaatttatgaaggaaaaatcagcgggactaaagcaggggttgccaccctaaacgttgcgatcaaaggggttacccttaagcagcagcgccaattaacgctacgggcggatgcggctacggcgaagatgttgggtagcgcaacggcgaccccagcgtccgctatggtgggcgagtcggttatttatcgggcgactttagtcgatgcctatgataacccgctgggggcgggtattccggtgacctggcgtgctaacgccgacagctacttgagccagcagcaaaccctgactaatgcccaagggataaccgaggtgtcgctcagtcgcaccaaggtgggtacggcgcaactgagcctaatattgaccggtggaacctttgatgcgccgaatgtgcctttccacgcaggcgcggttgatgaaagtaaatccgagttgtctctcagtccgggcagcattaccgccgatggcgtagatattgcgacgctgaaggtgatactgcgtgataaacaaggcaatttgctgtcactgcaaaaagtatcggcggaggcggatcagaaagacgcggtgacgatctctgcggctaaggaaaattcaccaggtgaatatctgatcctggttcagggaaaaaaggcgaccaccgtcagtttatccactcaggtcaatgacgctccgttcaaaactgcgcagacgctaacgcttaaggctgatatttccagtggaaaggtcgatagtattacgccggccgtcaccagcattgttgcagggaaggacagcgtcgtttatcgcgcggtgattagcgatgctgagggtaatttactgaaggacgctattgtgtcctggcaattaatctcaggttcggcggtctttgatcgaatatccagaacggatgggatgggagtagcacaaactaccttgagcagcaccgtagcgggtgacgtggttattgcagcttatctgaacagtaaccaatataagaatgctataccggtaacggtgaaacccggcgccatcgatcaaaacgcgtcgacctttgtcagtgacaaaatcacaataggctcggatggaaccgaagcggccaatttgctggttaagctgaaggatatttacgggaataatattcctaaagaggtggttaatattacctcatcttctacattgaccggttttaaggtgacgcctcagccaatgaaggatataggcagcggtaattacaccgcggctgctacctctaccgccaaaggtcagcaggtgatcagtgccaaagtgggcagcacccaaattggcaaagatattacgattaccatcggggcaataacgccggatttgcgttttgataatgcgcagcagcaagtgacctatgtcaaaacctttaaccaatcgcagccggccagaaatgttcccgtcggcgtgcgccaattttggagcagtagcgatcctgatgtggcgcaggtagatgacgttggcaaagtgaccctatataaatcgggcaaggtcactatcacgattcaaaccagcggtaatgggcaatataacccggctcagggcagctatgaacttcaggtagataaagccgatcctcagctcacgacggatcaggcaattattgccgattactgggcggaaggtaacaatccatcggtgaaggtttcactcaataatagtgatgctgccgccttaaccccaacttatcgaagtagcgatagcaaagtagtgaccatcaatgctcaaggtaatctgacgcaagtcagacccggagcgactgatattaccgtttcaacgccggaaaccgatcaattcaaagggagtgaattaaagattggctataccttaagtaaagggcggcatcctattaccttcagccaaccgactttccaggtaacggatcaggagaatctgtcggtagagcagcctattgtggcactacccgctaatgctaaatatagttggggaagcagcgatagttccgtcgttaatattaaacctactactggggagataaatagtcaggctgtcggcaaggctcggttgacgttaaccatggcatcgaatgaattctacgaggaaagtagcggctattacgatgtggagatctacggaaaaccgagtattagcggcaaggtagttcacctgagtaaaggtcagtcatctgaatcgaataaatggaatccgacgtttacccgcgatacgatatcggtgaactggtcatccgagagcagtaataaatacacggcgccaacgaaggtggtaattcagatatttgataacagtaccaacgctaagcttgaagaaataacggaaacttccagctttatgtcgaaaacaacgaccttccaacccaaagaaagctattggggaaaaaggctaaggattgttgccacggcatacgggtttaataatctgcaggatcgctaccagtatatggttgacgcgtaccccttagagccggccgctatttggaatagtgctattctaagatcgcgtagccttatttatatcactagctcaggggcaagagattcatcatgtcgggagacatggttgggtcgggagcatcatgttaacgcgaacattgataatttggccttaaactttagttcaggggatagattaatcgcaccgatggaagtgacggtaagagtcgactttggcggtcagtccaattcgaatgtttatacaaaaaccaatattttctccagtgagaatattgccgttaataaaagcaccaaaattttcagcgagtgctggaaaagccacgttgggggttactcaccatcattagttgtcaagttcggtgggatgacaagaacttactggggcgggtctcatggctggggggggaaatggtgacggcaacgatacgccgcgtgtggataattactaatgctaaaaatatgactatggggtagtcattttagataagtaggacagggacgttatttacaatcctcaccgcgacactcagtttcggtgagggttattttgacaataacaggtaatgattttcacagtaaaaatgatatcaaaagatcagaaatgtcctacgattagttattttaaccatgatgtgatgtcgcaggccgaccgcggtgatcatttttctcagagagagagtcagttactgagtatttctaatataggagacagttttattcaggacagagtgatgtacagcgaagatgtgttggatttaaatccggcgtcgaataaaagaatattggcaggaagtaaaactaaagcagagtctagctgtagagtaaaattacagacattaaaaaaaataaccatttatttaatcgagtgtaatgaagaaggtttttatttgttgaatcagcgctctgccttatctgaaaatcctgtcggcattaataataaacaggagattaaatatagcctttgtaacaatgattcttttcctgcgcgtaaagataaattaggccaggggattttgtagtaaaagtcagggggaataatgttccccattatgttaataacagcaaatcaatcaagaaaaaggaatgaaatatgcatttaagaaatcactcattcagatcctcttgtcgtcattatattaaaaatgcagaagtaactaaaaaggcatcagaagtttctataaatatagggagagttaattctggttattttgctagtttattcggtgtaagcaataccaatgttaatattagttggaaaggaaattccacgtcattagatctgaataaggtagttaaaaattgttggaagacaataaaaaataataataaagatatggaagaatggcggcggcaggagagaagcgtatatatccctgctgccattaataaatcaatcgacactgctgctggatatttaggtgccaaggtaagcacggagacgaaggatcgtgtttttgatagaacattccaatataggtatatgtctgccgagttttctggtgtgagtaacgtaaagagcgcagctcagacttctattggacaaacggtagggaactatcttagtcggaataattctctagacaatttatttaaaaataatgaattgggaagagatgccagccagccagatatgaaaagaaaaatcagagaagagcattctttagtcagtgcggaagtaacaaatttcatctcagaccagatctataaaaaatatttctcacaggatgtcagtgcgataagaaaagttgcattgcaattaacacttgaggaaacagggatgtttaaggctaaaaaaatcatgccgccgcgggtgtaaattctaagtaaacaaccaacccacatataagtgatattgccagtaaagccatatcttgggtaatgaccgaaaaaataaagcgtgattaaaatatgcaatatatgatcgaactttaaattcacgtgaactaaaagtgaattctcgctttatgatatatagaaggaacaataatgaagattaacaattcaagcacgttggtgatcaaccctactagggtaaatgaaaatagtcagactgaaagtgagagttctcgtctcaaaaaaaatgtcgcaacaaccacggcagtcagtaatacgacatctacattaaaagcaaaaataaacagatataaagctcaaagagatgaagcgaataagacattcacacctaaagaacagcgtgtaaaggagttttatggttcaaagtttactgtgactcaagaaggcgggttactcaccacctctaaaccttatcctaaggaagtacactccttattacataccgatgctaatatatccggagctaaaacggctgccacgatgagggctttaattgccgaggggaatatgcttgcggccaaaaagtcgcacatgcctgatgccaatattgacttggctaaagcgatacaaaacactttgttcgaggcagccgcaaacaatttatcagcgctcactgcacctatttccttacatatagataaagagcagggcatttcactcaataatgctaaaagagaatcggttaatgagtgggtggcaaggaatgataatagtgaaacctttatcatcttaaatggaaataatgatgaaacctacgtcaatttcattgctgagacgctgaaggattcaaagaatatcaatttcattaccagtggatttggcggacatggaacaacggatcggcacaatattgcgataaacaaaaccgaaggcgatcgcttcaaggaaattttggtcgggaaagggatttcggctagccgggtaaccgtcgatcctttctctactaacagtggccaaaacgctacgaatgtcgcagatattctagatcgtgtcgctgattcaggtaaacctgtatcaaccgtcgtggtcagcggtacgccagctgcagtacccaggcagactcttacctacggacaacagctgaagttagataatacaaagagtttcaatatagaatcattcccattctttaatccaagtgaatataacactttggccgatagcctagcgacaatcagagagttttcaacaacgcttaattatctgttcaacacgtcatatttgcctgccaaacccgagctgtattccgatgattttttctctgcggctaaagcatgttttagcacattggaatcgaaattgggtagtgaacattcagagttcgcccaacagaataaacctctattagaggcaatgaggaatgtggacgatgccatgatagagagattccgcagccaaagtttgactgaaaatgataaggcggcggtaaaaacaatagataatttcttcagatctttgttcaatcctcttgaactgacctttaagcgtgataatagctagtcaataccaatgtgccctctttggggggcacattcaatagtttttggagggggcgtcatttgcagcgatatgggattttttatcaggtcatgcagattatctaacgggtacgaagactagaagggcgggtttccttttcggtaaacgtcccaaacttttttcgcatatttcatccgcatttcatgacgatcttttcctgttcctgaattatatgccccgacggcttcccagctataaccatagatcttcatcatatcggatagtattgaggcaccgaccaatatggaaacacagggatctgaggtcaacattgcatcatctacgcctattttgcgcagtcggggaatatggctgctgtttatttgcattaatcctaaatcgtaacttccgttattattttttcctacggcttctggtttcaatccagattctacctgagcgatagaatagagcagcttggcctcaatgccgaaaaattgttctgaataggtccagcagttggcgtaaccttgataagggaaaaaaaagctcaggataaaaataattatcctcgataaagtcacgctattcattaatttattttccctggtggaatggaacgattcttgtgataagtggggttgtaagaatattatcagtaaatatatcatcatgaaatgataataactggttatgtataacaagctggttttttggaacaaaagtgacatccggtggattagtaatattaatattaaacataatcataatttgtattgatcttccatttttgttttttgatttcatttgtaattcattgtatttattggtttttatttataatgcttgatttttaatcttatcagatagggttaggatatttattaaataacgctaaatcaatgggtgattgtttgtcactggtacaatctgttctacatcatgaattgatggggaacggtaacaatctttcctagataattaaatttcctctcgttaatactaacgttatcgatatactcttacgcagtgtctcgtcattttctcatcatgtttttactgaatcaaagacatatattgagccaagagatcatgacgctccctataaagaatataatagatatatctttaatcgaatatgtcggaatgtttctgaaacgaatggtaactaacttatggataggcttagtactcatctatatctacaacaaaatgatcggttagagtttcaaaagccgcagctgttgctgactgaacctcataaaagcaccggtgttgattttaaattgatcggtgagaacggcagcgatgttacctgccagtttaagccgggtgaaacgggtatcgcggcttttttaccaatgtcattgcatattatcgaagggagtatgcgctatcggtcattggatctcattgccctgtgcaagctacaggcatttatagatacttcgcttaatcgcgtaggttttgaacgtaacaatgatatttgctgggggtttgaacccctagggtttcaagagaatgtgacttttaaacatattgagtattggttaatccgtcaatcgttacgggcagactccggaacggggaatatcgccagcatcttacgttctaccgaatggtatcgcttagtcagatttttactacaggaagcggatagcaccgaacgtttgcaggatttgggcgcacgctatggcgtttctgtgtctcattttcgccgcctgacgcgtaaggctttgggtaatacaaccaaagtagaaatgtgcgattggcggctagttcgggcgttattagatctgatgggagaacagaaaagtttgactacgttggcgatgaagcatggttattcgtctctttctcatttttctaacgacgtcaaaatatcattaggtgtttctccacgtagcctgaaagatgtcattatcagcgatgctaaaaaatgaattatgttattggttttaaaagaacctgcgtctgtattttaggggtggttgtactagcaggcatgcctgaaaaggcattttctgaggaaaattcatcaagtctttcgggctatgtagcacggcaaaatgatataaaagggctgattgacgctttgtcatcaagaatgaataagccaattattatcagcaaagccgtggcgcgaaagaagattagcggggagtttgatcttaataatcctcagcgtttaattgacaacatttcggcgcagttagggctgatttggtatcacgatgggcaggctatttatatttacgatgcatcagagatgcgcaatgccgtggtggtattaagaaacacctctttttcagcggtgagcaattttttgcgtaaatctggtctatatgatcagcgttacccattgcgctcagatagcgtgagttccacgttttatgtatctgggcccccgatctatgttgaattggtgacaaatacagccaaattcttagatgaaaagaacaacgatttggatggacgctcaaaagttgcgtctatcccgttgtttaatacgtttgttcaggatcgtgattttaaatatcgtgacgataggatcattattccgggagccgctagcattgttcagcaattacttaacggtaatgaatccggtggggatgttatggtgccagcaccggcgacagatactattgccacggatttacctcctcggctggatgaatttcccggtgtcagtcaggcaaaacccaaattaccttttgcagatttgactacggcaataagggggcgtccttcagcctcgggttttcagattgtggctaatccgggaaccaatagtctattggttaaaggaagcgctgagcaagtctcatacgtgcaaaatattgtcagtgttctggatttgcccaagcgccatattgagctatcggtgtggattgtcgatttgcaaaaagatgcgctggaacaaatgggcgttgaatggaatggtggcgtgaatgttggggggaaactagggatttcttttaacggtggagcatccagtactgtagatggcgcaacatttatggcctcagtgctggcattaagccaaaagaaccaggcgaatatagtttcccgtccgatggtattaacacaggagaatattcctgccatttttgataacagccggacgttttatactcaattgatcggtgagcgtagcgttgaattacagcatattacctatggtacttcggttaacgtattaccgcgttttaccgatggtaacgaaattgaaatgatgctgaacgtagaagatgggtcgcaggttcctgtctcttcagacactccaaatggtttaccggaagttggacgcaccaatatcagtactattgccagggtgcccagagggaaaagcttgttaattggcggttatacgcgagatgaaagtaccgatggggaggccaaagttccactattgggagatattcctctaataggcgggttatttagatataaaaaatcgcgcaactctaatacggtacgggttttcctgattcagccgcgagagattgaatctccgttacaaccggatgccagtaatcttattgccgatatgcaaaaaaatctggccaatcctgcgttgcaagactggatgcgaaattatgtggatagccagaaatggctatagatattggcaagttttcctcttcatcactcgatttgtaccagttacgtcgggataaggtgagcagtgaaaaaagtgctaatacgcaaaaagctgcccaagaaggggctgtgaatagtgacgaaacgcagaatattgcagatgattcaccagccgccgcggtgcagcgttttggcgactctattgatgaaatgtcaattctattatcgcaatttcgcaatcgtcgagattatgaaaaaaagattggtagtgcgagtgaaagcagctttgaacaaattttggacgaggacgtactgcctaaagtctatgcattattaaaagtcacgtcgagtgtcgatggttcaaatataaagaatctattgcaacaggtgcgctcattatttcctgatgacagcgatctggttttggtgctgcgcgaactgctacgtcgccgcaatattgatgaggtagttagacgccgccttaaaatcatgttgcagcaggttgaaaagcaggctaatccgcgccggcttaaagctggaataaatgtggcgtttaaggcccgcttatttgggaaggcactgcagcttgatccggcactcatgcgcgagagttaccgtgattttttagagagtgatgcccatgaggtcgaagtttatcaagattggatttcgacatatggcgctaagcatcgtgccgcggtggtcgattttatggaaagttcgctgcttagcgatatggatgcccaggatccaagttgttctcatattgaatttggtaatttattagggcggttaggacaggtaaaactgattcgttcaagcgacagtgcctttatagataacgtattgaaaaatgccttaatacgggcgcataacgattcggaacaagcttggttgttatttatgctatgcgtattacagcatccggaacatataaaagattatttacaagaagcgattggtgagagaataaaattaagtaaacacgcggaacgttcctcgttactacatattatctcgcaagcctgtaaaaatttacccagagaattattttatgaacctgaagatgccgatgtattagcgcgggaattcgagagattggcaacaatagcctatcgctacgagttaattgagcttcgtcggggcaatttagagtaaacgaaaaaattacccggctcgcacactgactctattgttaaaccaccgcccgttattatgaattcgagcatgtcgggttgtgcctgaaattgcagtagaccttttactgttaatttcttattgcgtatatgatttataactctgttggcatcaataatggaacctgattttgattactgaatttcttattaaaactagacggcatccagagttatttattctactgctggttattgtcattattgccatgttggttataccactgccgacttatctggtcgattttctcattggcctgaatattgttatttctgcattggttttcctgtcgtctttttatattgacagaatattgagtttttcgacctttccagccgtactgctgataaccacgctgtttaggttggctctatctattagcaccagtcgattgatacttaatgatgctgatgcaggcgatattattgcgacattcggccagttcgttattggcgataatctgatcgttggctttgttattttctctattgtgaccatagtgcagtttatggtcattaccaaaggcgcagaacgcgttgcggaagttgccgctcgtttttctctggatggaatgcctggtaaacagatggggattgatgccgatctccgggcgggttctattgatgcagatgcagcaaaagagcgccgcagcgtggttgaaagagaaagccagctctacggttcttttgatggcgcgatgaaatttattaaaggtgatgctatcgctggcattatcgtcattttcatcaactttattggcggtatgggcgtgggcattagccagcatggcatggatatgtccacagcgctggcgacatacaccatgctgactattggtgatggattagtggctcaaattccatctctgctgattgctatcagcgccggttttattgtcaccagagtcaacggcgatggcgataatatgggccagaccatgatggaccagttattaggcaacccatttgtgttgctgattgctgccatgctggcgctaggaattggcagtttaccgggtttcccgttctttatttttgctattctcgccgcaggactcagtggattattctatttcaaatggagtgagaaaaagcgccatgcagctaaaaagaatgctccggcagaaatagcttcaggagaaaagaatatcgatgccgaagggacatctctggggctaattggtgatctggatagcgtggcggcagaaacagtgcctttaatcctattggttccgacagcgcaactggccgcattacagaaagccagcgtggtggagcgttatcggagtcaattctttatcgattacggcattcatttgcctgaaatgatgttgaaggcatcggataatcttagtgctaataccgtcgccatcttaataaatgaaataaaagcggacgaatttaatatttactttggcctgctgcgtatcgtcaacagtaccgatgagctaaagcagttaggtgttgaatgcgttacccataataaagaaagttggaccgatagcactaatcaggcatcgcttacacagctaggctatcagcttagaccggcaattgatgagctctattactgtctgtcagtttctctggttcgccacgttaatgagtattttggcgtacaggaaaccaaagatttattagataagttagataataaatatcctgacctgatgaaagaagtcctgcgtcacgcgacggttcagcgtattgccgaggtatttcaacgcttgctgagcgaaaaaatatctatccgtaatatgaagatgattatggagtcgctggctttatgggcgcccagagaaaaagacgtgattgcgttagttgaacacgtacgtacttcattatcgcgttatatatgccataaattttcacagggagagacgctacgcgttattaatctctctgcggagtttgaagagaaattacggcagggaataagaaatacctccggtggttcatttttgaatctggaacctgcggtagcggaggaactcattgatgcgctgacgttagccacagataaattgacaatatctaataaagacatggttattttatcttcggtagatataaggcgatttgttaagcgctttatagattctcagtttaaagacttggaggtaatgtcttttggcgaaatcacggatagcgtatctattgatgttttaagaactgtctaatcaacaaggagataataatgaatctagatattgtaactttaattcgtgacacactattggaaacaggctgcgatgaatcgttattaaatgatttcgacggccactcgactatatcgctagatttttcagatcgtgccagcatgttaattagcctgattgacgatcaggtctggttatggtcgcgtattggtgaggaaaatactcacgtattaagtcaaaaagctgatgaccttttaaaaactttaatggaaggctgcgctttcactccgtcagggcaattacagttagccaccaatgacgggtatatcgaattaaaggggctagttaattcaagctataccgagaccagtactcgatttgctgaagcattagatgagttctttgcgctgcaagaaaagtttgtggaaattcttcaataatgagtgaaataccattgatccgttatcaggctcatcctttgcgcctgagcgggccgattcttgaatcggttctgccaggggtaaagatcggtgaaatctgtgaaatacgtcagcattggcaaagtaccgaggtggttgctcgtgcccaagtgctgggatttaatcgcgatctggcggtacttagcctgattggtaacgccaatggtttatccagagatgccgtgattagcccaaccggtagcgcattgacggtcgcactgacccattcattattaggttgtgtattagatccctcagggcaagtcgtcgaacgattctccgattccgccgccatattggggcatgaaattcgccccattgatgcaccgccaccatcatatttgcagcgcgtaggtattcgtcaatcgtttattactggcgtgcgagccattgacggcttgattacctgcgggatcggtcaacggctcggtatttttgctgcggcaggctgcggaaaaactacgctaatgcatatgttgatcgagcaggcagatgcagatgtgtttgttatcgcactcataggtgagcgcggccgagaagtgactgaatttactgatattttacgaaggtctgggcggcaacagcagtgcgtgttgatttatgccacctcggatttttcttctttggatcgctgtaatgcggctttagtggctaccacggttgctgaatattttcgtgattcaggcaaaaaagtggtgctgtttctggattcagttacgcgttatgcccgcgctttgcgggatgtggcattagccgcaggcgaagcaccagcccggcgaggctatccggcttcggtatttgaggctttgccaaaattactcgagcgtcccggctgtactcatagtggaagtatcaccgcgttttataccattttactggaaagtgatgatgaaccagatccaattgcggaagagattcgctctattttggacggacatttttaccttagccgcaaactggcggccaaaaatcattatccggcaattgatattttacgcagtgtgagtcgtgtaaccggtcaggtttgccaaccgtcgcatttacacagcgcagccgaagtccgacggatattggcgaaaatcgaagaattacagatttttgtggacctaggggaatacagcgccggagaaaatgcggaaaacgatcgcgctattcagcgacgtgatgatttattccgttggctgtgtcagcccgttgaagaacacgctgtatttgaaaatacattgagtcaattgcatgaatttgcttcgtaaattcactgcactactactgcgcagtgaaagcaaaactcagcgtcaggagcggatattaacgcagcttgatagccggatacgtgagtgccaaaaatctgttcaggctctagacgctcaacgcaaagcggcaaccggcctgttgcacagtttgcgcccgcaggggcagggactaaatcgcgccatgctgtatgcagtacagcggaaacagtccgcgcttcgtcgccgaattgccaatattgacctggaaaaagtacagcagctaacggatctgaaaagctgtgaagaggacaggcaaaaggcgcaggtgcagcgtctgagactcattcatcagtctgataaatacaagcatttgcaaatgcttgagcggaaagctcaccgccagatggccgaccgaatggaagaaaccgaaattgaggagattattgcatggaacaagtaaatagcgtttcaggagccaatacggggcgaacggaaaatatctccgaagttgcgcaacctatttccgatattgtcagaaagaaacagcaggaagaaaagggcgagcgttttaccgagatcgccgataaaaccgttccgtctatgccaaccctattatcgccgctattggccttgcaacttggaattggtcataacgctgactctacaaccaaaaaggctgaaataagcgcgctgaaaggatctaagcttcaggcaactcatccgcgtttggattatttaactcaggaaattcctgctaagccgatcgcacagcttcagcaaaggattcctgagcgtctaacaacgaaagatatgacagataaatccctactggctgctctaccgacgggaaaagaaacaaaaaatattgaagtaataagaaatccgcagccgttgcagaaaaatagccatgtcacagatgccatacccgttgcttctcttgcccggttccctacagataaaaccagcgagttttctgccaatggagatcgtcaaaatttaactgcgccgaatcatgaaaagttaaatattgtgcaacagattggcggcaaaccgacatcgactgatatgacagctactggagagagtgaagctttatttcctcagtttaaaaaagaggtaaaagtggattctctagcctcagataaagggcgccctgaatggttatatccggtaccgaataaatcaacccattcggtggtggatatagcaaccaaggctgcattgcctatgggaaaaaccgataagtttccacagccgcaatcaggaaataatgaaatagaagggccagggaaactcacttaccgttttaaacaatggggtgaaggacatcatgtcaatatttcaacgcaaacccaaaatcactcagctcaggtggtctttcaaccctcggacgccacggttcaacagcgtttaggcactggagaaatgccccagcattggagcttattgcgtgacggggaatcgcaacagcagcagaaacagcatcaggaacaaccgactcaggacgaggaggaagctcagtgattggccggtattttcgtcaaataagtcaggaacaacttgtctggtcacgtgttgctgaacattgggaacggcaaggtatcgacgtgagttttacgattcctccgcaaaatgtttgcctggtgtcatttgctactgatgccggttgggaaggccttcttgatttacgtaactggtttatgcaaatgatgccagaacaggcagggttagcgaccagcgcttttaccaatgaacaaattaaaaatttatttatcggatgctcgcagccgataaatatggcgttgccggaatttagctatcaatcaatgcagaatattgagacggttgaagataacaagctatttaatactccgttgtacgccatagatacggatcgcggtcgagtatggttgactaaatttgttcacgaatctgtcaatattccagcaaaaaatcaacggacagatttatcccatcttcctttgccgatatgttttgaaataggaagtagcaaggggagtttaaggttacttaataaattaatctgcggtgatgttttacttattactgatgtcaggcagcaagtaacaattcatggcaaacatattagatattaccagcgtaatggagatgaaataatgctagaggaagcgatgtcagatatgcctgtagaaaacaaatctcaggataaccagagtgatggtagccatgaccaagaaatatctatgggtttgtcccctcgctctcaaatgcctgttcgcttaacatttaccttgcaacaaactcaggtaacggttgaagaactggaattactatataaaggacatattttcacctgtgatcctgatgcggaaaagaaaatcatcattagcggtaatggcctggcactggctcgcggcgaattagtttggatagaagatcgcttaggcgttgaaataaccgagatataccacgaggctggcaatggaaaatgatgtttcccttgttgggctattagcgtttgccactttactaccttttattattgcctgcggcacctgctatatcaaattctccattgtctttgttatggtcagaaacgcgctgggattgcagcaaatcccttcaaatatgacgcttaacggtatcgcgctgttgttatcgatgtttgtcatgatgcctgtggtgcaagagggctaccacagttatcgcgagaataatgtcgatattagcagcgtagagtcggtgacttatttcgtagagaatggcttcgaaggttaccatcgctatttagaaaaatattcagatccggagttagcgcgcttcttctctgatgcgcagctaaaaagggacggtgttaaaagtggtagtgcagaggataccgaaagggtttctattttatccctgttaccagcctacgctctaagtgaaatcaaaagtgcctttaaaattggcttttatttatatctacctttcgtggtagttgatttgctaatttccagtattttgctggctttgggaatgatgatgatgagcccggtgaccatttctgtgccgataaaattggtgctgtttattgtgctggacggttggtcgctattgtctaaaggcctaatcacgcagtatctggatctggctctatagctcggagggctggaacaatgaatgaactcgtctttgccggtaataaagccttatatctgattctaatgctttccgctgggccaattgccgtggcaaccatcgtcggattaattgtaggcctgatccaaacagtcacgcagctacaagaacaaactttaccctttggtattaaattacttagcgtcgcgttatgcctttttttagtttcaggttggtatggtgatgtattgttgggctttgctcaagaagtattaacaatagcgttgaaataacctatgcaaatcggactgttttttaatattcacgactggctctacgcaatgatattggcttcggccaggttgatgccttcttttatcctactgccgttccttaataataatactctaacgggtatgatccgtatgccggttgccatgattgtgggggtgtcattgtggccttatccactccaggaactacctgattttgatacgttgttttatttcggactggttgcaaaagaagttatcattggactattaatggcctgttttttttgctggccattatgggtattacatgccgtcggtagcatgattgataaccagcggggtgcgacgctaagtagtagcatcgatccattaagtggtgtcgatacatcagaacttgccaatttatttaatttgtttgctgccgtgattatattagaaagcggcgggcttttgctcatctctcaggtatttcaagcaagttatcaactttgggacccactgtcttttactttgccttccctttatccagcgctaactttcctgagtattatgatggcgaaagcatttattctcgccagtccggttttggtcggctttctattggctgaagcgctgttaggtttattatcccgttttgccccgcaaatgaacgcattttcgctggcgttgacgattaaaagcagcatagcgttctttattcttattttgtatttcaccccgattattccagtcgaggtcattaatatgcgctttcatgcggattcattatttggctggttgaaataatacggtaaaatggacgttttatgtcatcaaataaaacagagaaacccacgcagaaaaaactgaaggatgcggctaaaaagggccaatcttttaaaagtaaggacttggttatctcatgtcttatcttaattggtgccgagtacattattaatatatcgagctttttagaaatggggaaaatcgttaccgaagccatcgcaaatggtttttccagtaccttccatgagtatgcgcgaatggtggcatggacgggattaaagttattgcttccctttttactgctatgcatatttgcgtccgtattcccgacgttgttacaaacgggatttctcatcgccactaaagcactaaagattaattttgcagcgcttaatcctgcgagcggtgtgaaaaagctatttagcttacggtcagttaaagatgtgatcaaatcatgtttgtatttggttagttttatcgttgccgcaaatattttttgggaaaaaaataaagagctcctttattcgcaggttaacggggcgcctcagcagattatattagtttggggggtgctgtttcactcgctgatcctgatatgtctctcttgtctgcttatggtcattattctggatgcattagctgagttcttcctgcacatcaaagacaacaaaatggataagcaagaggttaaacgggaagccaaagagcaggatggcaatccggaaatgaaatccaaacgtaaagaaatacatatggaaatgttgtcggaacaggtgaagtctgacattgaaaattccaaggtgatcgtggctaacccaactcacatcgccgtgggaatttatctaaatgtagatgttattccaatccccttcatttcagtgctggaaaccaatcagcgagccattgccgttcgtacttatgcgaaaaaggtcggcataccagtaatcgaagatgtgaaattagcccgacaaatcttcaaaactcaccgacgctattcctttgtcagtatggaggaattagatgaagtactccgtttactggcctggcttgaacaggttgaaaatgcctggagcagcgaggtccctaaagaataaacatcgttttacaaagatatttttcgctcattatttaagaattgcctgtgtttgaaaggggatgagcgttccttaaatgtagtttttatttacccatgattaaatatcgttatcggcagcagcattcacgcggtaacgaacaacctaggagataacaaggtatgacccaggaaaatacgattattagcgatgatgaaattgaaaacatgctgtgggctgctctcaatcagggtgccatgctaaaagacattcacggtgtatctgatgaaatgatggagcatatatatgctcatgcctaccagttttatcacaaggggcatttagacgaggctgaaaatttcttcagttttctctgtatgtatgacttaaataataccgattactttattggattaggcgcagtgaatcagctgaagaaaaactatcagaaggcatgcgatctctattctcttgcttatgtgatggggaaagataatttcagcccggtattcttcagcggtcaatgtcaattattaatgggtaattttgttaaggccatgcagtgttttgatttggtgtgtaagcgtagtgacgatgaaaatttaattaaaaaagcgaaagtttatttacaaactattcgacaaaacaggaaagaaacgaacgaagaggcagattaagccgaagatcgttacgtaattggagaaattatggctacgacgagtgttaataatacccctatccagcttgctggctatttgttaaatgacgccagcaatgaaaatatggcggcattaaagcaaaaaactcgaatgctgccgcagcagggtggttcaattatggcggcggccaatcaaaaattgcaggcagcgcaagaatctgcacgcaatatcatttccgccggcattgacccaacgctcagtggtgatgttgaagttgagctgaataatgcgcttttacaggaagctccagtcctgagaaaagcgaacagtaatctgactaaagacggagctctgttgctgttattaactcaaatgctgaatttaagcagtgaaatggcattgagtaaactctcgtctaacctttccatattaatgtctaccctggacgcgcgtaagaaagagggagaaaaggcaaatgccgagattgataaagcaatgggcgagaccgagcaggctttatctgagtttgaaaatgcggtaagccaattaggctcggctaataaaaatcaatcgcagaaaaaagagcttctcgatcaggccaaatcagatctggacaagctaaagagagaaggcgtagaaaaagacgatcctcgttatattgccgcggaaaagaaagtcgctggcgcgcagtccgatctcaatacggcagaggcggcaaccagtaaagctcaggccgtggcggatcaaaagcaacaagcggccatgagtctgcaaacgaaacttgaagggttaataaaggcggcggacgttaaatacagcgccgctttacctggcaacgcagctatcgctgggcaaatcgatcagcagaaagaaaaacagctcagcagcatggccaccatgaccatgctgatggggaaatttattgaaatcgtaggtgagaactcgatcaataaattaaagaatgatttagccatgacgcaaaaactccaggaagcgcgtcaaaaggatatgaccaaaaaagccgctgaatacgatgagcaactgcgtaaggcggaagaaacgcgcaagatgaccggctgcattgctgatattctgggcggactagccattgccattggtgctattacatcggtatttggcggcgccggagtagcattaatggcaataggtataggtttaatggttgccgaccctattatggaggcggcgacgggacaatctttgactggcatgattttaaatccatttatggaacatatctttatgccattaatgtcattaatttctaaagtagtggaagagatatttgataaaactccgattggtttattgcttaaagcaatagataaagccaccggggcaaatatgatggataccattcatagcgtagtttctgccgcagtgaccgttgcggttattattgccgtagcttattttgctaagtcagcggctaagtttgtcatcgaaaaaatgggtaaggcgatgacaaatatgattatggaaacgattaagaaaaccatcgagcaagcgctgaaaaaactggtgccgaaagtagttaaaagtgccggtaagcaagtgaatcaggttttcaaacaagcgagcaaaagcctgtccaagtcactatcaaaagatccggtagcattgaaaaagcaattgaataatatggagatgttacgtagcgtaaccaccgttggctctggcgtgactcaaaccaccggcaatatagtggcagggaatttacaggctgatgctatggaggcgttagcggcatttaaactcggtagcgcagatatggaaatactgaaaaaattctcagagcagattcttgcgtattttaaacaagagcaaacgctaatgcaggagttgatgaagaatatgtcctcggtactccttaaacaacaagacacaggacgtactattcttcgcaatatgcacgtttaatatcactccataacctaataggtaaataatatgtcatcatccattggcagtaatagtcacaaccttattctgaattatccgaatctagatattacaaaaaaagaattaaatggcgataaagagtcaattaaaaaaaatgcaaataatacgaatcagccgactgaatcgaataaatcaacggctgaaaataaaaatgtaaaaacagaggggaaaattagccctcaggcggcggcgctgcgagaacctcaaggtgagattcaaccaacggcgagtaaattgatgatggtggatttggctgagaagagaaccaccgctgcggtgagccctgcggacgacacgccaaaaccggcgattgccgcaccgacggttgaaacccagccaacgctgttgcaagagcagctgaaacatattaccggcgtcagcaatttcgctgctgaacaaaccaaggctaccgatgcagcacagcctaaacagggctttgccatcaccaatcttaataattcatttggtgccagattatctaatgtcgtgatgcttgcagtgaaagtattgactgaaatgcgagtggcggaaaataagctgggcggccatcagctagagctttcggctaaagcggcgcaagcctctgccgcacatactatccaaagtggtaaagaagcacgaaatcaagcgattactcaaggtgtcgttggtttggccaccaccgtgggtgggcaagctcgggcgatgaagggcaccaaaatgtcgaataaatcgcttgatgtgtccaaacaacaggctaatttccagaatcaggcgaacaaaagtatcagcgctctgaacaaagtggggccagggcaaaaacctggctctgccgtactacagaatgataaatcaattatcgaaggcggcgcgatccacgataaacaatacagtgcaacgctgaaggggatcgaaagcagtcgccaaatgaataatgcgcaaaaagtcattggtcaaggtaacgcggccagccagatgggcaaccctatgggggcggtagcggcgtcccagttccaggtgaatgaggctgaagagaaagccggcgcggcgattcaggaaaatgagaaatccgtcaagcaggaaacccatgctgaatcagtcaaacgtagcgaccgtgataagcaattgctgaatttgctgatgaatatgctgttccaaacggtaacggcaaaaaatgaaacgatcagcagcatgatcaataacaaagtgtagttgctaagcccccggagttttgggggcgatttttcatatgtctgagcgataagtgagtcagttatggatggaattactaataatcacaacactgtgcgtttttccgagcatttagcggttaattctaatgaaacgtcgcaggctcccgccgctgcggttaatgaagaggcaaaagctgctcgcatgaccatccggcaacaggttttgacgaaaacaaaaactcagttagataccttgcataattcagataaaatcgctcagggcgccaacgcgctgttaggcacattacgcgatattgagcagcgtcagcctgagcgagctgcgcgattagccgcattttctactgagggaaaaagtcagcaggattgtgataaacagctagagatattgctaacacccgataaaagtgacgctcttgctcgcacgcagttagatgcattacgtgctgcggcttcggataaaagcagccttgctcgccgcacattgttaattgacagcaccagtaagcaattgcaaaccattgcacaattggcgcaggcaaatcctgagaactatgacttaacggacgaacaagcggctgaattacaggctgccgctcggtctgttcggttcgctcctgcgacagaaccgacggaaaataaaggtccgatctccagttgggatatttataaggacttggccgacgccattggcgaaatggatgacagttatttatccgtccatgagtacgcagtgaaacaatattctgattttttcagtgatttctccgatctgaaatctaaattacaggaatttattagttccggtaaagacggaaatatcattctgaagtcaggtgagatcagaaaggaattagatgcattactgaaaaaatattctgtaaaccctgtcactaaagccgccgttttatttcctaaacaaagtgagaccggtgggattaaaggggcatctaaggacgatgcaaaggcatgggccagtgaattaggtgttgatccagatacctgcgttaaacaactgcctgatggttcttgggtttgtaccatagacaccagcccgctaacaaaaatgaaaagcgatctgccgcataacgatgttgaagatatgaactctgccaaattccaggcttggatggcaggttttgacgcgcaggcagaaaaactacaaacagctatgcaaagccacttacagaaatacagtaccgccagctccacgttcgataatttaattaaagttctcagtagcactatctccagtttgcttgagacagacaaaagctttttcagtaattagcgataaggaaagaatatgccatcttctatacaactggctgtcactcctcaacttgatttcagccgtatcacgcagaacgctaatacccatagccagtcttctgtggctgcgaatattagtcacatacagaatgtgcctgttaaaccctcaacagaacctgcatgcaataatcccagcagcaagtgttctaatgtgcgtagcgtttgtgcccagttacatacccaaacgcagtcgcagttgcagggttcaaactcccctgagccgcaggctcgtgctgcgaccttaaatgctcccgctgatattccaaccggcgagattttttacggtcagcatatggaacaggctaaagaagcctttctctccgagctaccggcagacaaaaaggctgaggtcaaaggaatattagacaatgccattgatgcaaaggggaaagataatgtcctgagatttatgcagttatttagcgaaaccaaaaactattgctgcgaaaatcagcttacaggggagagtaaagacaaggcgttttctgatatcgctaattctttagtcaaactgctgacacaggataaattgcgtaataattctgcgctaggcgataatagtacaaaaaagaatcacgaaaaatttgctgaattgcagcagaagctaattagtatgggatcagcggaaccgaaaaaacttggtgaacaaatattggttaatcaggtgtggccgctggtgtctgcttattttagcgataatgccgatcctcacgaaatatttcgtgaatcattgtcattgctcgatgggcaaagggatcaaaatatagcggacagtgccaagtcgcggtttgagaatcttactcaggatttcaagctgattgcggtggtattaaatcttctgcaatcgagaattaacgctccgcagggagacaccatcgacggcccaaatccgcccgcggcaccgaacagagaaacgcctgccgctccggcagcaccggccacgccaacgccaacagcaaacgcgcctggagtaacctacaatacttacaactattactttggtgctagttcctcatcgccaactcagccggctaatccaacgactgttacggtaaatccgactatcagccctttatttaatccggtatttagcccatctattaatggttatccggcaggtgacagaccagcatcggctcatgcgacggagactaaacgcgttaatgttgcagataaaactctggaaaacgatgggcagaaagacatcgcgcaaagagaggcaatgggtaagtcggtcattggtgttagtaatgacagcaagccaacgccattcacaacttttgttgatggtaatacgccgggaatggattcaacggaagttcgtgaacccattagccccgcgcctttgatgaatcataaatcgattctgacccgcgacaggtcagcgcagggggatcatgtacctgcgactgaaacagatacccacgacgaattggtggtccagaaaaaagtttctcatcagtcagagataactcggtcaacccgtgtagtaacagatagcatttcacagcttgattcagatgtggtactgcgtagcaagaattctaatcatgaaacgggagtctctactcgttccgcgactattacagctaatccgattaaggctgagataaatgcgccagagacgaacgcgcaggtaaataatagggtagtgccgccacggtttaatggttccgctacgacgtgggattcagttactccgtatttgccgaagcaaaatcatgtcaatccgcctaatacgcgtactgtagggcctgcttttatcggaggaatggaatcgccaaaccgaattgatcaattaaaccggagaagtagtgaagcggttcgtaatagcggccagtttttgcctaagatgactgcggagaaaacctcctcaccagaacaagagagtcataatgtcaatcgtacccgcgtgataatgccgccaaatcggccattgaataatcctacggtgcagactcaggttgaaacagcgttaaatattactgaaacagattctatttcgacaccaaatgcagcacatactaatttaaatgcagtacccgaagagcatccagaatcatttaccgccaaacgccaacgcttcgaagatgagagtaaagggcgtgatgcgtcacgattaaaacctaaaaaccctgcacctgcggcggttgattctgatcgaatagtgatgagtccaggttcttcctcggcattatctgggtatcagcctcctcgcagcgcaaacaaataaatttaactgagctaatttcacctttccttattgtagataaggaagggtgaaattaaaggacagattagatatgaaagcgattattgatgaagttttggtgtcctgcctattttgtgagcaggttgatatttcaccagataagcacattgttaacgatctttatgctgactccgttgctttgcttgatattacgatggctttggaagaacgattcggatttgatttcaataaacaggatatcgagcagtttgaaaccgttggcgacctttacgaaattgtcatgagaaatacggtaactctttagtagtatcttaatgttcaatgaaaatcattattttcttatctcaaggataaatcaatgactcacaaatcactttgagttaatgcatcagccatcatagttttgtaaatatatgtatatatttatcatcggcagtgagtaagatattgcgcagaatctttctttatcaaaaggccttaggttacgacctcaaaaaaatcaatttaatctaaatcataataattataatgatcgtttttttaaagtaatcacttagtgatctggttaattatataagcatgtagatatcttgtgagtttatatttgcaggccgattagtctatttttcagcatggctgcgactcgttagatatgttgcataataagaatgatttacattacaccttgtaaaattaatattcccttttgattttttaaagggtgaacataggaaagagtaaactatgagggccgcaaagtgattcagcatcgatttggtaattactcattaagctatgatggcgaccttatgcatcttaacgaacgtattcttattccaccgaaagaattggcgctcttaagattgtttcttgattcacgagagcaactgctctctaaagatacgattattgaaaaaatctggcatggtgtgcagatttccgatgagtctttaacccgctgtgtttatggcctaaggcgattattaggtgggaataaagattatattgttaccgtatatggacgaggttatcgctttgttcctcctgcgaaggaaaaagaagcttcaacgctgtttttctcccgcagtaatagcttctttcaacggccggatcgattcatctatccattactaaattaatgttaacttgacggttaactatatggttttataatgatttttattgagctttacttcgtgttttgagagggcgtattttatatggctctctcgctttttcatgctaactcttctacttagcctgttcctttcggactgtaaacctgcatcaatctctcatcattttttaatcaagatctcactctaaaaaatgtttctaatagcgccagtaatttgaatatttcaataaattaataacgcgcgcttggggctagaactctcaattatggttaatgaaactgaacatggcggcacatcaccacgcattgttgtgcgtctacttaacagtgtcttgcgagggtgcgagtttgttttagactcgggtacaactttatttatcgtgtctgaacgggagaatattcacgctcaaaattcaggaacggtacttccagaaaatatgatatttgttcctatggaacaaggcggtgttagctttgaagccgtggtggagaataatcaaaatgaaaaaaccactctaacactacgagagttaaaacctgacggtaacatagaaaatacagttaatcttaacgaagtgattcatatcggtactttagatctcgccgcgcgttttgaacatgatacgtggagccaggatatcctcaaccatcctgaaacgggaatcaaaaatacgtcaaagccgatggagaagaaaaaaggttggttttggactgggctgatactcctgttgctcacgctgtgcataacggtttggggctatacctattttaatagccagcagcgcaagattttagaaatttcgtctctgcttggatataaaaagaatcagtatcagtatcttcagggaagagacaagataacttatattctggccaatgatgaaaaatcaatgtattgggcacaacaagccttggtaagaaatccaccttcatcttcagttaaagtggtcaatatcccggcagaggagtcgcgtattagcctttggctgaatgaacattggccagcgttaaaatttcatcgcatttatctcagcaatcccacagagccggttgttctgttgagttatgaaagagggcgtctggacaatactcagaaaaacagattgtctgaattgctgaaaaaagaaataccttatgctgattcaattgtttttaatcagatgaaagattcgttagtggcgaaagaagctgagcaaggcttgagtaaaatgtcgattgtttttagtgagaataagaacgttgatagcgtcacttttgttatccggggagaaatggatgacagcgaattacaaagaataaagacctttgtccaaagttattatcagctttgggggggccagtatgtgcaattttccatagagctaaataatgactggctcaagggcaaatcctttaaatatggtgatcaggggtatgtaaaggtttctccttctcactggtattttcctaaacctttatctttaaatgagaaataaatatggctaatcctccaatttatgcgacacctccatgggaaggttttctttccgagaaatcagcctcttttgatactggcgtaaccagtttgaacgaggaacttgagaaagcattggcctcgttgaaaggggatccatctgacccgatgctgttagcacaatatcaatcacgactttccgaatatacgttgtaccgaaatgcacagtccaacgtggttaaagtctataaagacgttggttcggcgattattaccaacttccgctagttattacgtatgagttattacacaaagggtatgactgccctttgtcattaattaattgagatcactatgtccgaatctattactggagttatgtccgtcacggcgttttctcatgatgcggtgatggcatctgatgatgttatgtcgctagatagtctggttatgcaggctctggctaaaggcgtggtgacatctgatgctgaaaaaagccatgtgctgaataaaatacaggacccgcaaacaacgtcagatccggcacagctattcgagttgcagcaaagaaccgctgaatataatttgaaaatgtccttattcgccacgctgacccgaaaagctatcggggcagttgaaaccgttgtgcgtgcataacaatgcttaaatttaaaatacttgttcctctgttgttgttgttattggtcggctgtaaagagcaggagctgcttaaaaagctcgatcaaacgcaggccaacgaaattatcgcgttattacagcgtaataatattgatgccagtaagaaggaaattaccaaagaaggctatgtggtatcggtcaataagatcgatttcgccgcggcggttgatctgatgaatacctatgatttacccaccagacctcgaatagaaattgccgaaatgttccccagcgattctttgatttcttctccacgagcggagaaggcacgactttattcgggaatcgagcaacgtctcgaacagtcgttacaaaccttgcaaggggttgtttcagcgcgggttcatgtcagctacgatttaagctcgagtgaaggccaaaagaatagtattccggttcacctttcggcgctggtgaaatacgatgctgaaaatattgatgccacagtgatgatcagcgatgtgaaacgcttcctgaagaatagctttgatgacgttgcctataacgatatttcggtggttctttccaaaataccgcaaatgcaacatcaggctcctttcaccgtgaaaaaaggtttaggtgggacgctgtggtttatgattgccgcggtaattctctttattttttccagtatcgctatgtacctgtatcggaaaaaacgcactgaaattcatccagcggcggaaagtgaatgagcttgaagaagggaatgggtgttagccagcttgaccggatattatttgatcctttgtcctggatacatcctgagcgcgttcgaattcccgaccaatttaaccgcggcctatgccgcagcgtaatcaatcaagtcttgcttgacgcgttgaatatttcgacacaatacgaccacaggatatctaatgggctaacgcgcctttttattgataactggttcattcttcccaaggtggcttttttaatgagctgccagcgttatcgtgcctgtctggcatatggtggaaagctggaaatgctttctgctatggcacgtcagttcgcccaattagaattaatagaaaccagtcgttgcccgtcagatatctcgccggatgttcagtggctgcgggctcaggcaataaatgaattattgtgcttcagtcaggatttacctgacgcaatcaggcaacgtattccattactctttcctggcggtggagcaatcagccttgagcggcagataaatccgactgctgatgtattgttattaaggttagctatccaacatgcaaaacgatatagagactagccatccgctaaatgcgctagaaggtatcttgttaactaagtcggctattttacgacgcaagatggctaaaaatattctggtagaggctcagattcgcgccagaaaaataattaaacaggcgcaggcagacgctgaaattttacatcatcaggcttatacccaaggttatgaaaaagggatagtgagcgcggcagaagccgtagtcggttatatggaagattatcagtctctcagccaccaattataccaagagttacagctcgaggttaaaaacatgttatcggggatattacatcaagacgaagtttttcttgccctgctggataattggttacatgaattgcgtgttgaagatacgccacaatctctgcatctattacttcctgcgacgatgaatcaaggctcgaaagaattggctggattgctggagcgaatttggaaagggccggtggtgattgattaccacgccgatcggcgttttgtcatgaaatataaagatcagctcgctgagtttattccagatgagtttattgatagcgaaatgcccaaactgttagggacaaaatcactacgggaatcatgtgggaaactgtctgagaatggcttacagcggctgagaactgtactgactcgacatttggataacgcgccacagaatttaccggtaaacgaggcgtaattaactaaggatgaatgtgatgatcggtgatattaataagattagcggtgggaaccttgcaggggatgtggctgataacacaaaggtagaatcgctggatgtcatgatgaatcaaaaaacagatatacccatgacgcctgaagagtttgctttcaaaatgctttataacgagtggatgcaggaaacattattatcagacggacttcgccctgaagataaggttgaatggtgaaaccgatgatttttaaaagaacaacatcaccgctatattttctccctttggggctagtaattgttctgagtggctgtagttaccataaacaaataacccctttgtttaaatcgcaggaatccttaacgcgagctgaaataataaagcagttgcagtgcaatgatgctaaagataatacggctgactcattgttaccggtggcgctttaccagcaaatgaatcaatgtgctgaacagggaaattaccgctcggctacgttgttattttcattagcgggaacctacacctggtacgacgccagtcgaatagatacggattcggcgcgcaataaacatgcacaattactgggagaggctctcggacgattagcgccagagcgaagagaatacctgtggcgcaatattcaatcggtgctaggagatcgccaacagctggataccgtttgccaaatggttcgcctgatcggcccgccagcataccagccggattatatggctggaggtgagggtaagatgatgcctgatttttcggcgttgccacgttgggatggagcattgcagaattatctacattgtccgatagattaaatggtcggattgatattggccagccgcttttgtctttccattttcaatcccttcatgccaatggcgtttgtaaattaggggtggccaatttaatttcccatcgttcacaaacgccggttccaagcagtgattcagggcataacgcggataaatgcaaataatagtgccagtaggataacgattacccccgtggctacagcaagcctttcagaaaatagacgacgcattaggaatatccttaggcaaagtgataacgttcggagtggtatttggatagcggcacgttcaattcatccaacgctttttctatggcatccatcatgatatctgggccgcagataaagtattcatggtctgcatattcgggcggcagatgacgttttagcagttcaccggtaataaaaccacgttcacccggccaatccggcggtggctgggtaagtacatgtaccaccttcagatccagttttaattgcaacgactctaactcttcgcgaaaagtaatggattcccagcttttactgccataaagcagaatgacagggcgtttatccccgcgatcggccagcgtgcgaatcatgctcatcatgggggtaatgcctacgccgcccgcaatcaagatatgcatatcggccggatgacccaaagtaaaagcgccgtaaggcccatcaaggtaaagccgttgtccgggagtgacctctggaattctctgagtaaagtccccaagattgcgaattgacatctcaactcgcccatcctgagcctcggcgctcgacgaaaatgaaaatggatgaccggtaatcttaaacgggctgccccaaagcgttaaccagccaaactgacccggagtaaaacgaaagcccttatgcccatccggatgcatcaccaaagtcacggtatcgccgcgctcccggcgcacttcgctcactctataaggttttcgtagcataaataacggcttaaccaggcgaatgtagagcagcaaggaaaaccagaaagcgatcagcgccacccatagcccgcgtttccacgggtcttgcaaatagaaactccagccaatcatatgcagaataccggcgatcaccgccagtaatgcgagaataatgtgggttagatgccaaatttcgtagcgaatttttaactgcacacgccataaagccgtcacaaccaatgctattaatgaataagttgaaatagcggcgaagcgggcgcgccaaggtgcttcgataaaattcagcagagccaggagttcggggcgaataacaaacagaattatcgggtgagcgataaccagcgcaacggcaatcagagaaatgcgacggtggaagtgataaattacgtcctccccccaaggttcagttacatagcgaaagcgagcggtcaggccgaattgtagccccatcatcgccaaaccggcatagcctagagccacagaaaactcggtccagaaatctcgcgcaggcggcatggtgccaagcaacatggcaaatagcggagccagaataaagaacagataggttagaatccaaagcgtgctgcgtatggcataaggcatctattgtccctttttctggatcacgatatgactaagtataatcggacaatataagcctccatttttttattaatcttgaagcgttcccatgcataactcattgtaaaaactgaattgtgccctgcgagctaaattagctaaaggggaggggaaataccggcgggctatcaccctttttggcgtcaacgttgtcaattcagtcggtttaatcaattggcttaattaataggagaatagcaaccggaaagtcatctatgcggttatagcggctcttgttgtgttgtgcagtgaataccgccaccgcctgctgcgatcccgtcaatgttaatcatcacgatatctctatttggataaaggtgtttaagctgcgctttggccgctgtatcagtgattttgtcgccaaactccggtgcaataaccgcattattacagacatagaaattgatataaccggcggcaaaatcgtggtttgcatattcccctcggctatcagaaggattttctaataccacgacgttgagcttacggcctttggcgtcccgcgcattgcgtaaaatagccaaatgctttttagtgacttcgtgatcgaaagactgcggatcgggatcgtaaccagccaccaccgttcccggcgtggtgaaacgggcatagaaatcggtatgaccatcggtaatatctttacctttgataccgggcaaccagatgattttttctaaacctaacaggcgcttgagttcggtttcacaatctgctttgctcagacttgggttacgattttggttcagcacgcagctttcggtgataatggcggtgccttcgccgtcaacctcaattcctcctccctcaagaaccaggtttgtggtcatccgttctacgcccgcctgttcagtgacaaaactggctacgtgcgcatcctgtcgatgcagttgcttatttccccagccgttaaagttaaaatcaataccggcttttttaccctgagcgttatggacaaacaccgggccggtatcgcgtagccacaggtcatctaatgggcaaatcagcagttctaacgccgacccgattaattgataggcgatttggtaatcatcctctctgacgagcatggtgaccggctcatagtcggcgatagctaacgcaatggtggcaagattacgctgcacttccggtaataaacgaccgccccagatagctttgctggcaccaaatgccatccaggtgcgacgatggggcgcgctttcgtcgggcatcatccagcgctgtttatcatcctgatcaatcatagagaacaccttatttgattgtaataataagccgcccgccatcagcgtggcggcctgaataaatcgtctacgggttgccatattttcgtccttcgggtttatgtttactgtagataagtatcgctggtgcggtagcttatctcgcgctggcaccgttcatttcctgcatagcggatgagtggctttattatctgccttctgtttcttgataaaaattgatgtttattgcattaataccccaataaaattaatgtgtgagtgaaaagtgaaccgtattccctctctcaaactattaatggggttcgaagccgcagcgcgattaggcagttttgcgcgagccgccgatgagctttgcctatcgcaatccgccattagtcatcagatttcgcagatagaagctcagaccgggcagccgctgtttcgacgggttggccgaggtgtagaattaaccgtagcgggagaagtgttacagcgaacggtactgcgcacgctggaaactttgcgtagcggaatgagccggattgcgacttatcttgatcctgggctggtggcgatggtttgtccctcgccgatattacagggttggttacagccgcgtttagatgcgctacaacagcagattcccgatctttgtccgctgttatcctccgatgaaaccgcccgttttattgacgaaattgatgtggatattgccattgggagtcgacctctcgatcaggaaggattgctacagcttccttttttgcaggatgagtgggtgatggtggcgagcgctgccgtagcggaaaaattgattcttcacccggcgaatcaccacagtgacatcaccagcctgatttgtctggaggagcatctcaccggtgagaaaaccggcgcgctgctggcgaccttgttacagcgcttccggctgtccgccatttatgatgatcaatctggcgtgatggatgcagtgcggcggggaaggggaatggcgttgctgtcccgtttggcggcagatagcggattacaggatggaacgctggctgtggttgacgactatgcgccgttgccggggcaaacgttctggatttcccgcgtggcaggagaggcgcgatcgcctcaagtcatggcggcattcgcttggctacagcagcaaaataatatatctgagtcattccaaaaacatatttgattgactacagataacccgctttaatttgctgaatggggttttaaaatcaatcggtagcgattaagtgcgagttaggatgaaatgtaacaaataagttaattaactccatgattgcaggcgttaattttatttagtacattgttgcgcgtatttagtctgtatctggtttttagcacgcctaattggaaaattaatacaatctagagaaatagggatatatgaaaacctctcataagttactcatcagcttcatttgtgtcgctgcgctttccggctgtgcacgtaccgttcctgtattaacgccttacaccaatatcacgacccataattctaccgaacagatcaaaacggccatcctggatgcaggtcagaatcgtgactggattatgactccggtggcgccaggtgtgattgatgggcgcttaatgaaccgcgatcacagcgtgaacatccgtattaactacaccccgaccaactacaccattaaatatgtcagcagcacaaacttaaaatctgctaatggaaaaatccatcgtaattataatcgttgggttaataacctcgataaagatattcaaaaacgtttaatggctaatgctaataaataatacggaaatttgagttaagtcggggccggattaaccgtaatctggctttggcgatttgatattggacatcaaaccatggccgtgcgctataactacgataaagataatattagtgcgcttgacgcaattaccgaggcacagagaattgcttttgcgcccatgttatttcaagcggcggtaaatctcagggattcaggcattctatcgctgttggataattgcagaaagcagggcgcgacccggcaggaaattacctgcggctgcgagctgaacgattatgccgtaggcgtgttgttagatatgggcatgagcgggaatattgtttaccaaaccgaaggccgctattttatcggaaaaattggccactatttactgcatgacgctatgacccgcgtcaatatggattttacgcaggacgtttgctatcaaggcttatatcatctgaaagaatcattacagcagggtaaaccggctggacttcaggttttcggttcctggccgacgatttatccggcgctgagccagttgcctgagcctgcgaaacaaagttggtttgctttcgatcatttctattccgatggcgctttcagcgctgctttgcctcacgtctttgcccttgagccggcaaaaatttacgacgtgggcggcaataccggaaaatgggctttacgctgctgcaaatatcatgcgcaggtcgagatgaccatcatcgatttaccgcagcaaattctgctagctgagaaaaacatcgcgaagcatgggctgtctgagcgtatttctgtccatgaggcagatatattgaccgatgtgcagttaccgcaggaggctgacgtttggtggatgagccagttcctagactgtttctcggaagctcagattattgctattctcaaaaaaaatcgcagcggcgatgaagcccgacgccagagtgtgtattatggagctcttctgggattgccagccctacgaggctggagcatttagtttaaatgcttcttcgctgtattttacctgcatggctaatggtaacagtcgtttttatagcgtcactgatttcctgggttatttacagaaagccgaccttgagttggaaaagcaaatagataatcttggcattggccatactttattgatttgtaaaaaacgatagcggctgactgaaaaaagccgaatcgaggcactaaccgaaaaattataagaaataaggggcaattgggcatcagtcaattattgcctcggtatttttctcattttctccgccagagatcacgaattcatgcagtttactctgaacatcaccgattggcaggctatcgcgcctggattagccttggcagatgaatggcgcagatgggctaatcaatcgcctgccaggatagatcacacccagccgctggctaaatgtagcctgttgccgatgatgacggctcgtcgcctgagttcaggaagtcgtctggccgtggaatgcgggttagcgattttgcgccgccaaccggtggatgcgattgtatataccagccgtcacggtgagttggagcgtaactaccgcattttgcaggcgctggcgacggaacaaagcctgtcacccacggattttgctatgtcggtgcataattctgcggtgggtaatcttactatcgccgccagaaaaccgctggtttcatcgtctttatccgccggcgcggaaacttttcagcaaggtttgctcgaagttatggcgttacatcaggccggctattcccgcgtattaatagtggatttcgatggcgtaattccagatttttaccatccatatatgacatcggatatgccaaaatatccgtttgccgtagctttactgattgaaccgggtgatatcttgcgctgcgctacccgcaaggggctgtcgcccgagccggaggtgccccagagtctgcaatttttgcatcattggctgggttcgcacgcttcctttgtcgtaaccggcggtcgatttgattggcagtggagccgttaggatgaaagcgttgaagctggggcgacaaattaatgggctgtggcggctgatcatgacggggctatgttttgccctgttcgggctgggcgggctgttattatcgttgctgtggttcaattttctcctgctgactcagcgtgatggtcagcagcggcgcattctggccagacgcagcatttccgccagttttcgcctgttcctcgctttggcccgcaggctgggtgtgctggattaccgcttgcagggcatcgaaaagattcgcgctgataaaggttgcctgatcgtcgcgaatcatcccacgctgttggattacgttattttggcttcggccttgccggacgtcgattgtctggttaaggctgaactcttgcgtaatccctttgtaaacggcgtgattaaagccgccgattatttggtcaatagtcagggacaaaccctgctgctggcctgtcgccaacgtttaaaccgcggcgagaatattttgatttttcccgaaggtacgcgcaccagtccgggaaaaccgctgaaattacagcggggtgcggccaacgttgctgtccgttgcgagtgtgatttgcgtattgtgcatattcactgtagccaacaaacgctgaataaacagagccgctggtatcagataccgccagaaaaaccggtgttcagcgttgtagtgggcgaacgtattgctaacgaatattttgtggctgtcgaagaggatgcgcaagcgcttgccgctcgccagctgaatcgacaattagcccagttattgacgcctgagaatggccaacccatggatacggatgatgcaagaacgctctcttgaattaaaaaaactaattattgataccctgaatctcgaagatatgactcccgatgagatagacgcagacgccgcgctgtttggcgacggtttgggactggattccattgacgcgctggagttaggtctggcggtcaaaaatcgctatggcgtgatgttatctgccgaaagcgaagaaatgcgtcagcatttttactccatcgccacgctggcgtcattcattcaatctcaacgcgctaaatagtcggataacttatggataaacaagatatttaccaggaagtgtcggatctcttggtcaaacttttcgaaatcgaccggtcgcagatcacgccgcaggcgcgtctgtatgaagatctggaattagacagtattgacgccgtggatatggtggttcatttacagaaaaagaccggccgtcggatcaagcctgaatcctttaagtctgtgcgtaccgtgcaagacgtcgtggatgcggtagaacaattattacagcaaccaggctgatcggttgtttcggaaaaccacgccgtttatgcaaaatttcctgcgcatcgccaatgggctaattatgttgttatggccgttcattatttgggcgggcgtgacacagggtctgtccttctggttaattccgctgtttattgcctttttcctgctacgcctgtggttactgaaagatcatggggggctgcaaggtcaaacggacggccaaatgtatgcggggaaagcgctggcgttaaccggtattgctctttgcgctgcgagcgtgctgatgcgcgatcatcatgtgctgatgtattacccggtggcggttaatctggtgctgttgattctgttcggcagctctctgttttatggcatgccaatcgtggagcaaatcgcccgttggcgtgagccggatttaccgccgcagggtgtgcgctatacccggcgtgtcactcaggtttggtgtttgttttttatcatcaacggctcgactgcactggcgacctgtttgtataacgacatgaaaatctgggcgttatggaatggcatgctgagctatatctttattggcggcgtgatgggcgtggaatggctggtacgccgacggataaaaaaccgatgaatacattaccgttgactcaatggctgtctgaagaacgggcgggtagcactttgattgcccgccgcggtgataaagatatcgacctgaagacgtttcgacaggatgtgacccagctttatgcgcgcctgataagcagttcagaaacctgttgggcgctgtgttttaacgatagctatcagttttgtgtcgcgctgctggccacgctgtacgcgggcaaaattccggtactgccagggcataatcggcgagcgcagctcgttgagcaaagccagcatttcgagggggtattaagcgatctgccgctgaaactagactgccctgtgtggtcgctatcggacaccgcccctgcgagcgtgccgttaccgtcgattgccgctgacgctagtctgcggttattcacctcgggttcctccggcgaaccccgtcgggtggataaaccggttgccgtgatggatagagaggccgtctggctggctgatttatggggcgatcggctgagtcactgtgtggttcgggcatccgtaagccatcaacatctgtacggtctgacgttccgcatctggctacctttagcgctagggctgcctttcgccagcgaaacggtggagttccctgagcaactggcgaacagtccgcgctgcgcctttattaccagcccggcgtttttacagcggctggatagccagttgccgccgccgcgttgcgaatgggtggtttccgccggtgggcagctacattttgacgatgctcaacgagcgcagaactggctcggaatcacgcccgatgaaatttatggcagcactgaaaccggagtgatggcatggcgtagccggcatcatccgcagacaccgtggcagccttttagcggcgtgcagctgagtcgcgatgagcaggataactggcgcgtggtttcccctttgattcccgatccgttgggaatggcgttggatgatcgaattattgtcgacgatcaagggctatttacactggccggtcgtcgcgatcgggtagtcaaaattgaagaaaagcgtctgtctctcagtgagattgagcggcgattgcagactttgtctggcatcgaagacgttgcggtgctggtggttaaacgcggtgcgcggcaatgtatcggcgcggcggtggtgctgaatcaggcaggattggacgaattagagcaaatcggttggctgcggctgacccgccgctggcgacagcagcttggcggttggctggaaccggtggcattaccgcgctattggcgcaaattatcggttattccgcttaatcagcaaagcaaacgttcttggcctcagttacaggagttatttaatgaaacccgttgagctatcccgtcaacagtcggaacggcatcagatggaggttagactgtatctggaccccaaattaagctggtttaccggacattttgacgtacaaccgctgctgccgggcgtggcgcagatcgattgggtgatggggtacgcggcagatatcgcgggcgcagcctggcagttttccggtatcgataaagtcaaattccagttgccgctgttgccgggcaatcaggtgttactccgcctcgattggaatgaatcccgtggcttgctcagttttagctatacgctggatgaaggcgtcgctgcgcgcacggccagtagcggagccataaaattatgtcgttaaccgttcacgccttcgcgccgtgcgtggttattccttgctataaccacggcgcaatgatgaatgatgtgttggcgcggctggctccctttggcctgcactgttttatcattgacgatggcagcgaacctgccacgcaacagattttacagcagttggccggaacgcactctggcatcacgttggttagattgccttgtaatcagggcaaaggtgtggcggtattaacaggttttaccgtggctgccgaggcgggatatagccacgtgttacaggtggatgccgatgggcaacactgtattgaagatattcccgagatgctgaaacagtcgcagcgctatccggatatgctgatctccggccgcccgatttacgaccagtcggtgccaaaatctcgtctgtatggtcgctatattacccatgtgtgggtatggatagaaactctgtcgctctccctgaaagacagtatgtgcgggtttcgggtctatccgctggctccggtaatagccctgatggcgcaatatccattggggaaacgtatggattttgatacggaaatcatggtgcgcctgtactggcaaggcattgatagtcgttttgttcctacgcgagtgacttaccccgccgacgggctttcccattttgatgcactgcgggataacctgcggatttcgtggatgcatacccggttatttttgggcatgttgagacgtctcccgcaattgttaacgcgacgtcgtccgcgtcactgggctggagtcaaagagcgtaaaggtctgaacggcatgcgctttatgctcgcggtttatcgtctattagggcggaaaactttcgagatattactacgtccggtagtgggatatttctggctaaccggccgaactcagcggcaggcctcgcagcaatatctggtacgtttgcagcaaactgcccagaaaaagtcattggctttgccgggcaatctaaccagttatcgacatttcctgcggtttagtcgcgcgatgctggacaaagtcgccagttggcgcggggatttgcgactgggggagcaaattgtatttgctcccggagcgcaagaaaccattaatgccgagtctgacggtgggaagctgattctggcttctcacctcggagatatcgaggtgtgccgcgcattagcacagcaggatggtcatagggtaattcacgctctggtatttagcgaacatgcccaaagatttaagcaggtattggaagaaatcgcgccgcaggcggggattaatctgattcccgtgacccgcatggggccagaaaccgctattttgctgaaagagaagctggacgccggtgaatgggtggcgattgtcggcgatcgtacctcggtgactacccagcgcggtggagaccgccgcgtggtgtggagcgaatttctcggtgcgcccgcgccgtttccgcaaggaccatttgttctggcatcggtattgcgctgcccggtgttactgatgtttgccttgcaccagcagggcaaactccatatccattgcgaaccttttgccgatccgttgctgttgccacgtcagcagcgtgagaccgcattgcaacaggcggtggatcgctatgcgtcacgtctggagtactacgcgctgcaatcgccgctcgactggtttaacttttttgatttctggcggctgcctgattcgccgtctggcaaggagtaacaagtgctgaccgatgcccgttttaccgccgaagtagagattaccgtgcctttccacgataccgacccgatgggcgtggtatggcacggtaattacttccgttatttcgaagtggtgcgagaggcgctactgaatcagtttaattatggttaccggcaaatgcgtgagtctggttatgtttggccggttgttgatacgcgggtgaaataccgtgacgtgctggagttcgaacagcgaattcgggtcagagcccacgttgaagagttcgaaaatcggctgaaaattgtgtatcagattttcgatgctcaaagcggcaagcggactaccaccggctataccattcaggttgccgtcgaagaaagtacgcgagaaatgtgttttgtcagccctgatattttgtttgaaagaatgggaatcaaaccatgaaaaaatggattttaatgttgtcgctggcgatcgccgctggcgcacaggcagtgacgctggatgagttacagcagcgtttggcgcagcagccggtggtacgagcgcagtttagtcaggagcgccagatcaaggatatgccgcagccgctgcgttccagcggtgagttactgatcgcacagaaaaacggcctgtggtggcaacagcaaaaaccttttccattgacgctggtgttggatgataagcgtatggttcaggtaattaatgggcaggagccacagattgttaccgctgattccaatccgcagatgttccagtttaaccacttgctgcgcgcactgtttcaggctgagcgtcaggtgttggaacaaaatttctcgctgaccttcagcgacttaggacaggggaaatggcagttggagctgaaaccgaccacgtcgccgctagataagctgtttaacactatcacgctgcaagggcagcagtatctcgatcagatttcgcttaacgatcgtcaaggggatcgcaccaagattacctttagcaatcagcgcctgacaccagatacgttgacccatgatgagcagcaacgttttgtcttctaagccgagtttatgggcctggctatggctggcggcttgcctgttgctgggggcgacgctcacggtattgttaccgcaatccaagctttccagtagcgtgctggcgctgttacctgcgcaaagtatggggcagattcctccggcgctgaacgacggttttatgcagcgtttggaccgtcaggtggtctggatggtcagccccgccgaaggcgatgatccagcggcggccgcgcgctggctggaacgcttgcagggtctgccgtcgttgaccgccgttcaaggacctatcgacgctgatcagcagcagaaatgggggaaattcttctatcagcatcgtaatggcatgattgacccgcagacgcgacagcgcctgatgaacggtggtgatgagcaggctaactggatactggcacagctttattcggcctttgccggtgtgagcggcagcgaaataaagaacgatccgttgatgctggtgcggggctcccagctggcgctacaacaaaataccagccgtttgaggatgaaaaatggctggttggtggctcaggatgaggcggggcgcagctggtattttatccacggcgagctgagtggctcctcctacaatatgcagcaggcgcatcaggtagtgacagatttggcggcgctcgtgaccgatcttaagcatcattttccgggcgtcgaggtcatgtcgcgcggcacgctattttatagcgattatgccagccagcaggccaaacatgatgtttccaccttgggttccgccacggtcatcggcgttttgctattgattctgggcgtgtttcgctctctgcgtccgttactgttgtgcgtgttgtccgtcggtatcggcgcgttggctggcagtacactgaccttattgctctttggcgaactgcatttaatgacgttagtgatgagtatcagcattgtcggtatttcagctgattacaccatttattatcttaccgagcgcatggtgcatgggcgtgaaacctcgccgtggcaaagtctgcacaaggtttttccggcgttaatgatggcgttggggaccacggttctggcctacctgattatgatgttggcgccgttccctggcctgcgccagttggcggtttttgccgccgcgggtctgactgcctcttgtctcaccgtggtgtgctggtatccgtggttatgtcgaggattaccggtccggccggtgccattcatgatgccattgatgcgttggctttccgcgtggcgcactcaacgcacgctgtatttaggtttgccactggtattggcgttgttctccgtagccggactgctacgcttgcagattaatgatgatattgcccaattgcaggcgctgccgccggatattcatcgggaggagcaggctatcacggccttgactgggcaaggcatcgaccagaagtggtttgtggtttatggcgatacgcccgagcagacgctacggcggttagagcaatttgctccgcagttacaacaggcgaaaaaacagggctggctcagcggctaccgtttgctgccattggcctctcaggcgcagcaacagcaggatctgacgctgctgcaacaggttgcccccaacgtgctggcacagcttgataccgttgggatagacgggttgaagatcgatctcactccaatgccggtcacgccggagaactggctcaatagcgtagtgagtgagggctgggcgttgatgtggatgacgttaccggatgggcgtagcggagtattggtgccgaccgacggcgtgcaaaacagcgccgctttggcagcgctggcggccaatcatgctggcgtcagttgggttgatcgcaaagccagcttcgaccagatgttttctttctatcgcactatgctgggttggctgttgctgggagccattgtggttatcgccttgagttacatgttgcgcctgggcgtgcggcgtgggctggtgtgcgtattgccttcgttactttctctcggctgcgggctggcagtgctagcgtttagcggccactccctcaacctgttctcgctactggcgttagttctggtgctggggattggcattaattacaccttatttttcagtaacccacgaggaacaccgctgacgtcattattagccgtaaccgtggcgatgagtacctcattgctgaccttgggtatgctgatctttagcagcactcaggctatcagcagtttcggtattgtgctgtgcagcggtatatttgccgcatttttgctggctccattggcgatgcatcaacgccgtaaagggaagaaatcatgatgattttacgttgtatcttggctatgtccttggctttgatgctgacggcatgcgccactaaacccgcggataatcggcctcaggcctggttaaaaccgggcgtgaaggtcagcttacctgcgccgggtatcacgccggcggtgaatgaacaacagttgctgaccgccacggtgaaaggtaagcaacagtctttgctggtattgcttaatgcagatcggcaacagctttcgctggtgggattgtcatctctgggtattcgcctgttcaaactgacctacggtgcgcaggggatcgaaagcgagcagtcaatcgtgctacctgagttgcctccggccagtcaagttctggccgatattatgctgagctactggccgatttctgcctggcaagagcagttacccgcaggctggacgctggtcgacatcggatcccgccgcgaactgcgtgataagcaaggaaaacgggtaaccgaaattgtttatatgaccagcaaaggcgtgcgtcagccgattagcatccgccagtacgtttttggttatcagatcgcgattcaacatctggacagctaacatgatttatatttctgcggtaggcatgctgaacgcgttaggaagcaatgccgatcagattgccagccagcttcctttgggcatcgctcccggcatgaagccgcgcgatggctgggttcagcccgaacaaccctgctggttaggcgccgttgaaggtgaactaccggaaatcccggcggcgcttgctatgcatcgcagccgcaataatcaattgttattggcggcgttggagcaaattcgtccacaggtcgatcaagcgatagtgcgctttggccgcgatcgtgtggcggtggtattgggcaccagtacttctggattaaatgagggcgaccgacaggttaaccagcgcagtcacgacgaggaaagtgacggctatgattattatcaacaggaattaggcgatccggcacgttttctttcggcctatctcgaactggagggccccgcgttcaccttgtctaccgcctgttcttccagcgccagagctattatcagcggccggcgtttaatcgaagccgggctggcggatgtggcaattgtaggcggcgcagatacgcttagccggatgccggtcaacggttttctcagtcttgaatcgctttccactcagctttgccagccttttgccgccgaacgctgcggtattactataggtgaagcatcggctctgatgctgctcacgcgggagcctcacgagatagccttgctcggagtcggtgaatctagcgacgcatggcatatgtcggcgccgcaccctgaaggcgaaggtgctattcgcgccattgaacaggcgttggacgatgcggcaattcaacctcaggatgtggggtatatcaatctgcatggcaccgctacccggctcaacgatcaaattgaggctaaagtggtcaatcgcatattcggtaatggcacgccctgtagctcaaccaagcatttaaccgggcacacattaggtgcggcaggcgtgtgcgaagccgcgctgtgctggctgttattgactcgtgatttacccttgccggcacaggatttctctcattcaacgccggatgacagcttgccgtcttgtgggttactgctagagcaggagccattgatgaaggcaattgttatgtccaattcatttgcctttggcggtaataatacctgcctgattgtggggaagcgtcatgcctgaatatttaccggcgggagattatttgcctcacgcggcgccgatgatgctgctggatgaggttgtcgcggtagaagcagaaagcgtgcattgtcgggttaaagtcacagaacagggcgttttagctcctttcctcactgccgaagggcatttgcctggatggtttgcgttggaattgatggcacagaccgtcggcgtgtggtcgggttggcatagccgccagcggggcgagcgggcggcgaatttgggcatgttgctcggcgcgcgtgcgctacgcagccagactcggttgattgaaaacggaaatttattggatatcactatggtcttgctaatgcaggacgaaaaatttggcagctttgaaggtgaaatcagctgtgcagggcaggttttggccaccgcgcggttgaatacctatcaaccggatcaacaagaacttaaacaattatttcaacaggatgaaatggaatgacacgttcagttttggtcacgggcggcagtaaaggtattgggcgagcgatagccctccaacttgccgccgatggatttagcgtggccgtgcattatcacagcgatcttccaggggctcagcaaacggtagaacagctaactgcgcaaggcggacaagggcggattatcggttttgacgtagccgatcgtgatgcgacgcggcaggccatcgagcaggatattgatactcatggtgcttactacggcgtggtgaacaatgccggaatagctcgcgacggcgcgttcccagcgctcagtgaagacgactgggacagcgtgatccataccaatcttgacagtttttataacgtcatccatccctgtattatgccgatgatcgggttgcgtcaaggcggcagaatcatcacgctgtcgtcggtttccggtttaatggggaatcgaggtcaggtcaactatagcgcggcgaaagcgggcattatcggcgcaaccaaagcgctggcaatagaactggcgaagcgcaaaatcactgtcaactgcatagcgccggggctgattgataccggtatgattcagatggaagaagcatcgttaaaagaagcgatgaatatgatcccgatgaaacggatgggcgccgcagaggaagtggccgggctcgccagctatttgatgtctgatattgccggttacgtgacgcgtcaggtgatttccgttaatgggggcatgctatgacccgccgcgtagtgatcaccggcatgggcggcgtaactgcctttggcaatgactggcagagcgtggccgctgggctaaagtctggtaaaaatgcggtacgcagcatgccggaatggcgggaatacgcgggattgaataccttggtcggcgcgcctattgatgatttcactttaccggagcattacacccgcaaacgcattcgctcaatggggcgagtttccctgctagcgaccagagcgaccgaactggcgctgattcaggcgggtttgatcggcgaagcggtgctaaccaatggtgaaaccggcatcgcctacggctcttctaccggcagtaccaaaccggtcagcgaatttgccaccatgctaacggaaaaacacaccaataatatcaccggcaccacttatgttcagatgatgccgcataccgcggcggtgaataccgggttgttcttcgggctgcgtgggcgagtgattccaacttctagcgcctgtacttccggcagccaggcaataggttacgcgtgggaggccattcgccatggttatcaaacggtgatggttgccggcggagcggaagaactttgcccgtccgaagccgcggtgtttgataccttatttgccaccagtcagcgcaatgattcgccacacaccacgccgtcgcctttcgatatcaatcgagacgggctggtaattggcgagggcgcgggcacgctggtgttggaagaattggagcatgccaaagcgcgagatgcgaagatctacggcgaagtcgtggggtttgccactaactgcgatgcggctcacattactcagccacagcgtgaaactatgcaaatttgtatcgaacaggggctgcggatggcgcagttacaggcggcggatatcggttatatcagcgctcacggtacggcgaccgaccgtggcgatctggctgaaagtcaggctaccgccgcggtgtttggcaataatacgccgatttcatcgctgaaaagttatttcggccatacgttaggtgcctgcggagcgctggaggcctggatgagtctggaaatgatgaatgaaggctggtttgcgccgacgctcaatctgactcagcccgatccggcctgtggcgaacttgattacatcatggggaagccacgccatattgataccgagtttttccaaagcaacaactttgcctttggcggtatcaacacttcactggttttccggcgctggcgttaatcgatgatgcgcatcgctctggctcgaatcagcgatctcagccaacctgctgtcaccaccgattggttgtcgccggagttactggttcaggctcccagcggcaaacggcgggaggcgtggctggcgggaagagtgttgctggcgcagcgggtgggtcagcgacctctcagggaaatgatcattgaagcatcgggaaaacctgcgtttcggtgcgatcaattgccacatttcaatatcagtcacagcggcgattttgtttttgtcgccgtgagtgataaagggccgattggctgcgatattgaagtgatcaggccgcgaaccggtgcgatagagattgcccaacactatttctgtgaggctgaatatctgtggttggcggcgcagcctgccgaaaatgtcatgatggcgttttggcgcttgtggaccgcgcgcgaggcacgattaaaacaacgcgggctgagtgtttggcaaatgcgttcaatagcgttaaagcccgaaacattgggcattgccggcagcgaaatttatcattggtatcagcaagggttgagcatggcggtcagttgctgtccgtcagaaacggcaaacagcgatctcaccgtggataaatgagcgtattcctgacatttatcagattattaccgatgaacttccccacaaagcagcaccacatccgggcggcgctgatggattttagccgccacggcaaggcattcctgacgggtaggatatatatcttcagacacgggaagcgcgtcacaagcatctattccgcatgtgctgaccagtagaacaaatcctataagcatatatcccccttattcttcaaagtatagcgcgcttatcttgcgagtatagaggttttgttgtggcatagcgctcgctttaatcataaaaaatgccttactaacaaagatttccacaatatgccgcgcacggcgaattccacatggcgtaacccgctcttgggggatgttatgaataatcatattggcagccattagcgcgagacggcagtggaaggatcactctgtctgctattgagggtccatcgtctattaggattttctgctttgtatttatgccgtcaccatattggctattgtaagcgtttcattttcatcttcaccgctatgggatatcacctatgggtaaatcatcgcgtatatattctttaaaactttagttggccttagagcggagtgagcgcgcgtgtctgtggtggtaaaaagagtgaaaaggattctcactagttggagatatgtctgaaaaccattaataagataagggtttgagcttaaaacactaacgtaatggagtacataccaatgaaaggtaagttgctattagcgatattactgagcgcgagcttttcgcttcaggctgatgaaaccagctcttggactgatgaaggtcaaccgtctcctgagcatttggagatgcagaaacccgaatttcatctttgtcaggatggacaaaaccagtcaccgatagatatccgtggggagttaagaagtaacctggcaccgctgaccatgcaatattttaccacgacgctgaatatcgtaaataatggttatacgattcagttgaacgtacccaaagggaataaagtgcagttagatggcgaaacttttatgctgaaacagctgcatttccatgctcccagtgaaaataccataaagggtaagcaatatccgatggaggcacacttcgtacataaaaatgagcagggagaattgctggttgttgccgtgatgtacaatctgggcaaagaaaatatggcgctggaaaaagtgtggcagcaaatgccaaaaggattgaatcaggaacagaagatcaatccagcgttggatctcaatggcctgattccggacagcaaatattattatcgcttcagcggctcgctaaccacaccgccttgttcagaaggggtacgctggctggtgtttaaacagcctttaagcatttctgaaaaccagattacgcagtttaagtcggtcattcatcgcgataataatcgaccggtacaggagttacacggtagggttattgtaaattgatttctggatattttaatttttcagggaatctaaaaggattttcaataaaactgttaataaatcgctaagggtgaaaataaatctttatcgatatatttaatgtaatgtttcgtcagcgtaaaacagcgtgctttatttggtttatgctgacggaatcttattggatatatttatggctaaacagccagacgtctaaatgggtatttaatttatttataaataaggcttgattaaaatgattggctatgagtaaatagcgtcatcggtttggaacacagaccttatgaaagcagttttagtaaagcagttcacagtattagcgttatcctcaatagatacctcttcaccgcgaaactccttcttaagtgccccataagaaataactgaaagacagacctctcttgccttatggcagcttaaataaatgaaggaagtatcgctatgtctaatacaatgactggtttagtaaaatggtttgacgcgggtaaaggctttggttttattaccccagcagacggtggcaaagatgtattcgtgcatttctcagctatccagagcaacgattttaaaacgctggatgaaggtcagcgcgtagagttctcgattgagaacggcgcgaaagggccttcggcggccaatgttgttgcccttaaagacaggcaataacgggaagaggctttccgaccgcgatgacgggtttccctgagcagtgaaagccctctccataaaaagtattaccggtttgcagtaaagattatgtcagcagttttagttaagcagtacgtcgaattagcgttatccgaacgataccttctttgtcaatgcctctctagcgatgcccataactattaatatttctgaccgttacgccagatggcaattaaaaaacaaataaaggaagtatcgctatgtctaataaaatgactggtttagtaaaatggtttgacgcgggtaaaggctttggttttattaccccagcggacggtggcaaagatgtattcgtgcatttctctgctatccagagcaacgattttaaaacgctggatgaaggtcagcgcgtagagttctcgattgagaacggcgcgaaagggccttcggcggccaatgttgttgtcctgtaaagacaggcaataacggctaattatcggatagaaatccccggttttctatccgataaaaattgccaacaaaaaacccgccttgtgcgggttttctggttttataggaaattaaatggcctgcgctgacgatgtatatagctggaatagtggcacattaagattttgtagcagaaaccaaaaataacattgggcgctctttttcttcatccaatgccggttgttctgcaatttgctgcgccgtaggcccccattcttcaaggcgatgtagagtaaagccggcgtctatcaacagattaatataagtggctaacgtacgatgctgcttaatcactccgtctgccagccaattggtgacgcggttgccttcggcctgataatgattaaccggccatgatctttggcctttatcatcagttaaccaaccctgctggatcggtgcgctaaaaatagggtgttcggcagagaaaacaaatttcccaccgggtttaagagagcgaaaaatcgtgtcgaacagtgccgatagattaacgacataatgcaaagctaatgagctatagactaaatcgtagttattttccggtaatttaagttgttccagatcctcacggcagtagcttattttgctgtcgtcggtcatttcattggccttggccagcattttggcggaaacatcaatacctttaacttcccgagcaccttgctcgcgggcataacggcagaaccaaccgtagccgcaacctaaatcaataacgttaagatcgtgtaggtcgggtagcattttggcaatcgatggccattctggtgcgccgtttaacccctgagttgaacgattcaattgtgcgtagccagcgaaaaatgccgggttatcataaatattctgagccatatctgctccaaaagtcgttaggataaactgaagtttattattaaggcgtttttccagggcagtttaacaagaggattttaatcttaatgcactgcgccagtgggaaaataaggatagcgccgaaacagacggcgctatctgagtaataggctttttaggatttcagtagaggtcaaaagacgcaaactgaaggcttaccagccaaagcgagcgccaccgtcggtagagttgtcctgttgaccgcgttgttgaacctgctgcattcgacggtcagtctggcctttttcatttatcacatggccagaactcatatatttaccacgacattctgctgaggtcttatcgtgacactgatagtaagaatcagcatcggaagagcttgaacatccggcaactaatgtggcgcaagccagcaaaaaaactattttcaagtccattcatttccccttaaattccgtttaccttattgttgctcagtaaagataaatatatcagcaacgagaataatattacctccagtttgcattgaaatctattattgatgattagtaacggatttatctcgcggaactattacgctatttgaacgcgcaatcacagcccctatgggcacaatagggcaatatactttggtacgacgacattgacattatagaaaggggcgtttatgcaagtgagaaaagccagagtagaagaagccgaggcgctatgggcgctaagaaataatgcccttaggagtggctgtcggaacgtttatgatcaggccacgcttgcggcttttacgccagatgtcatgccatcgggatttcctccggtcatcatggtcaatccatgttttgttatagatgatgaagcagggatctgtcccgttggttcaggctttctcgatcttaaaaatcattctgtggaggcggtatttacgcgggatacctatcagggaaaaggcgtgggttcacggatactggacgctattaaacaggaggctattgcccgcggtattaataccctgaggctttcctcaacccccaacgctttggcattttatttacgccatgattttaatttgctgcgtgagggcgagtatttttcaccgtcagcgcaaaaatatttgcagtgttttgagatggaatggcggcgataaaaattgaattaagctaaatgctacattttgccctttgaacaggcgtttgagctagggagttaaattcctcagcgccgtgtctgtcactaaaaaatgtagagataaaggggtttaacactgccatatccaaaatttttattcttttattgtcaattgattagagcagttttggcagcagactggttaatcaactaatcatattgcttaaatagacaatttggcatatacactcacgcaattttataaattattaaaaattgctgagcgctaaggctgattgttaaatgaaaagtatagggatagccatattaaccgggatgttgacgttgggaagcggtgctcaggcagctgaaactcaatcttacttcttcgatggcaaaatgctggctcacccggttatttatggtgccagagaaggcaccgccgtgatcgcctttattaaagaggccaatggggttaacggatattattgtctgtgtgaggacgaagctaacccggatcctacacagcgtacgctggatcgttttggccatgccagtattgagtcggtctttttcttcgatatggataacgctggcccgctgaccttggtattaagtaaaaccggcaaggcctatcaattacgagcttatcgctattgggagaatggtcgcggttttgttaaagtcgataaattgcagtctgccctcgataagattatcagcaatcaaaaagcgccgacggcggtgatgattaaaaccgcattagctaaattgacgccattcgacctcgctataacttaccagccgaccggaattgcggaatttgacgcgatcgatcatttgcaggggaaattggtcagctactttaatgaagacgagcaacccatacctgaacctaaagatctcttctctaccgacgcggtattttataaaaaacataccagcaaaaagaagggcttttcctgactgttacttatatccgctgggtatttagcgaagaagatgcgcgcccaagttaccatattgccagaatgagctgggaagccgatcctaaacaatatcgcggtactgaagatggcccatatattgtctatcaaatgggcgaaattatgacacgcggacaatataaacaagggaaagaaaccggcgaatggagtatcaataacggcgaacaggagcaattattcggcacttatgtttacggcaaacgccacggtaaatggaaaatcatcgggcgtgaagcaagtcgcaccggcatgatggtgaacgacaaacgcgaagggcgttgggaaattagtgacggtgaagccagtgaagactatggcctaacggggttcgatacttttgttaacgatcggcgtaatggcccaagcgagagacagtttaaagggaagattactgagcagggaaactacgtaaacggtgaaaaagaaggtcactggcgaatgcccggagcagtcggcagctatttgcacgacctcagaaccggcgattggcttattttgaccgaagacggcggtcgcgaagagctagtgctgagcaaaggtcaaagggacggggcatatcgtaaatttgatgccaaaggccaactgcgggaatattctaattataaatctggtgaattatccggtgataaagaagtgtacagcgagcaaggtaaattactgtctcgtggtacttatgcacacggacaactaaacggacgagaaattgtttattacgaagatggcgtgacgttacgtgcagatcgtggatttttaaatggagaactgcatggctccttccgctataacttccctaacggtaagcctcaagaaattgctgattacattcgcggtagaaataccggtatccgtcaggtattcaatgagaaaggtgtattgctgattgaggctaacatttgccaattcagtaatggttttgaacaaagcggctattgcggacatcagcgcgaatttaaccccgatggcagtccagtgagcgataaagattatctgtggggacgtcagcaaactaataatagctggtaccccaacgggcagaaaaaagatgaaaccctgctaggtaaaaatgattcgcgtattcagactagttattatccgaacggtcagattgaatgtcgcgtccatctgcaaggttttgaagcttttgttctcgaggggaaagagtataaggataatcagggggctcatcgagagggcgaaaatatctgttattacccaaatggacaggtaaaaagccgcggaatctataaacaaggcgtggttgtaggggggtgcgaaacaaagtttgatgaaagtggtaagcaaatttcccccggcccgcaggggtgtcctaaacatacctgggtttacgaaagctaattaaagctaactattgatacgaagggcggcgtttcgcccaaatttgcctctggcatttatcttagcggtgatgccttatttttcgtggctcactgctaacggataccgagaacgaattcagatgaatggacactcctttgattgatcaaaattatcagcgctggttattgacgctatctgcgcctttggttgccctgaaccaggaacagggggcggcctatgattgccctaaattctatccttttgatactacggtagatttaaccgagagctggggcgtggataatcgcgaggaactgatcgctatggtcgttcggatgaccgatgacggccacgcaccacatttggcaggttattatcatatgtggcatcgctttagccatagggaatggcaggattacgtggctcaacgcaccgggcgagagcaggtttggctcaatctggtcgctgagacggcggcaatttgcggtgaaggaggaattcaggcctgggatttggctcgcgtcagttttttatgccgcattgggctgctcaaccgttggattaatgaagaggaaaatctgtggttccatacccaatttgcttcacgcgctaggcattattacggtgattgggaaagttattataacgcctttctgattggccgagcctattggttaacgcaagataacgacacgccggaaaccctgaattttgccctcagtcaatgcagcggcacggcggctagcatggagtatgccagcgaattgtatctcacccgaaacccgacttttaagcgccttccgtggcaaatcgaaataatcgaaatagaacgaccagaatctttacagggagtgaatctgtgatggagacaaattgctgggcactgctgggcgtggctccaacggaagatcaggagattattcaggcggcttatcgtcagcgtttgcctgacttccatccggaaagcgatcctgaagggtttaagcgactgcgtgcggcctatgatgaggcgcgccgctgggcggagaaaccggtgatttcccgttccctgtggaaccagaataatgtcacagagagtgaacaacggataagcgtcatcaataatgagtcagattctgaagaagatgaggacgacgacgacgatgagtttatcgatgaggattatccggcgattcaacgtctgctgagcgaattcgatgagctattagtcaatccgaccgagcgctatcagccggagagctggcatcgtttcatttatcatcttgatcaatacagcgtgacaatagtcgatcgtttacgttggccgctgttagggcgcgttcaccagggggctgcgctttccgctaactgtgtccggctgctggcggaacgtttgcaatggcgcaagaggctagatgaaatatcgttacaagctgcggctgatatggatgcatttctaaatcatatctatcgtgaagatatgttcgatttttccttgctgtcgtcgatgagtttgcccgcacaggtggaaactgtggtttatttccatcatgcgcgccagctttattgggaacagcctgccgcggcgttacggcgctggttgttgatgccggtagcgatattctggccagattgtcagcaattattacagcaaatggctcgttggttcagtttagccgaaatccccagcccgtggctgcgggacctttgtcaggcaaaactggcagaatctccgcgagatgcggactggctgtacctgtgcgctcgccatgccaatttactgggcgacggcgagcaggcgatagctcactggatggccttgtatcagttagatcaacatgctgaagccgagcagggcatgttgtcctggtgtcgccgcgagcagccggaaatgttgccattgctgattcaggcgttggatcgccccagttatccggctgatacctcgatggaaatcgatgacgatgagcagcaatatctgaggccgacccaatcgattcagacgcaggtgcgttggggaaatgcatcgcagctgacgttttctccgcaaggggaagcgctggtgaaatggaaatcgggcgcgcatcggttagagagtatgtacccgcatttgctgaataatcgcggtgagaatgagatcgaccgtttgtattggcacgccagcatgttagcactggggaacgaagcgttattacaggatattctggatgaaccgcagccggattcgccgctggcagccctgattttacatggattacagcgacaggctgcccaacgattggattggctaacacattccacagtgatcgccgggttaattcattggctgaatagtccgcaggatcaaccaatgccgtcaatattgggtcaggaaacggcgatccgtcagtgccaaatgtggttgtggcaatggcgtcatttacctgcgttgaatctcgcacatttatatgaaagcgagttgtaccagcccaaactggaaccgattaaggattggctcacattcttgtctacaatggataaaatcgagctacccgcgccgcaaaatatttctcatcgtgatgatttccgtcagggtatcttgctgatattgatgctgggatttgccgatgatcaaatggcgacgatctgtcaggctgattcacgccttctaccgccgcagcacttggctttttcgctgtttcgagcgtttaaacgagtcgatttgactcggggcaacggggttgagcagttaaaacatcagttacgcatggaagaccggctccactatctttgctggacgcatttgccgctgacggtggatgattatgtggctcactatcagtattgcgcgcacgttagcggttgcgatttttatcaggctaagtggcagtctctgatggcgcaatcgccgatgcctcataaatcattgctgtgggctttcttctcctaccacggtgtgcatgattatgtggcagcgttgcaagagcaacagacggaaacccgggatgaagcggcgtttaaaaaaatgatcgtggatatcacgccgccgcatctggaatctaaaacagcgttactgaaggaaaatccacgcttactgagtctggctaccggtaatttccgtttttatgacaacccggactatctgccggaacaatcattgagcgatgaatggctactttgggcgcaagatgaagaggaagatccggcgctgcgattaaccgccattatgttggtacaattagggcgagagcgtttagccggtttcaaaaatgcgccgcgtcaggtgagtcgcttttggcagttctggcgtttgaaaacgcgcctgggccgcggaggattagtgaagcaagtggcgggtggaaccctgctgattagcttggttggcgatatagtgctgctggatactttgcctaatacgttgctactttctgtcctgatggtgggaaatctgtttagcggtctgactcgtcgcgccaacgatctcaatcaggaatccccgcgccttcaggctttggtcagtatgctaaccctattcccgttgctgctgtttttcttcggtaaaagttatcctggatttacccatagcgggccgccagcgggcaatggcgaataaccgaggggaggcaccgtcgcaggtgcctcccgcgttttcgtctctgctatcgcggcatagggcttaagtcgcaattcgcttaagttacgatcggtttaagctacatatctcgcttgagtcctaaatggtttatagctgcatatcgtcgagaaactgttccaatcgttgacgaatcggcgcgataacctcttcatcctgcccggccaacaccgtctcgaactcccgtaaccaaatgccaatttgcctgcgcgggtcacctaacgtctgcgcccaggctttctcaatacgcgctaataacgcccgattgtgcagactgtcgcgaggatggattttcaggcagttgagacgttgatggctttcccgacgctgctgctctgtcagtccggttgggctatggtcgatgactttgctaaaagtgccgccgctgtctggaatattcacgtccacctctaacaacccgttgatatcgtaactgaagcgcacatcgagagattgcaagcgtccgttaggctgaactggaacttcaaactcatcgataaagatattgttatctacgtgaggactttccccttgataaatggcaatactgatggctttttgattcggatagcgagtggagtaagtctccacccgcgaagtgggtactacggtatttcgttccagaatcggtgagaaaataccgctgcgtttctcctcggcggtagcaatacctagggtgtaggggcacacatcggtcaaaataacttcttcgatatcttcattacgtaaacgacaggcggcctgcgcggcggcacctaacgccacaatagtgctaggatcgaggtgctgatgtggcagtttgccgaataaacgtaccacgagtttctgaatgatgttcatccgtgatgcgccgccgaccaacaccaaatgatccaactgctgtggctgcaaacgtgcatcgtgcaacgcctgttcgataggcgcccgcaggcgattgatcagcggtagccagatgtcttcaatacgtagctcatccagagccatacaccaatgcttgtcttgccagtgccagcttaattcgtagcgggccgtttgcccattgaactgatatttcagctgttcggcgctgtggtagaggcgagacaaatccgttgccggtatcgattcggcagacaattgccactctttcagcgccgcatttatcaacgcctgagtgaagtcttcgccccccagatagttgtcaccggcggaaccctgaacttcgatcagcggtaatgcgtattccagaacggtaatatcgaaggttccaccgcccaaatcgaacactaaagtgcgcccgtgattctgagtatgcaaaccgtaagccatggacgcggcggtcggctcgttgatcaaccgaaccgcattcagccccgacagctcagcggcaaaacgggtttgcttgcgctgttcatcactgaaataggccggaactgaaatcacaacgtcgctaaccggttggccgagatagttttctgcatcggccttcagggatttcagcaccagagcggacagttcgggcgcatcgaagttttgctgagccagtttgaactgctttttgctgcccatatagcgtttaaacactgaggctgacctttctggatgagtggtcaggcgagaaagcgcggcgcgtcccaccaaaatagagccgtcctcgtcgatactgaccaccgatggggtcaaaaactcgtttaaggcgttgggaatcagtaccgcttgcccctcttgccaaacgctaatcaggctattggtcgtgcctaaatcgatgccaatggctaaaggcgcgcgctgttgttccgtcatgttgattatctcgctgaaatattagcgttaaattcagggtgaagtttcgctgggcatggtgcatgcccagcgctgtgctgacaaaaaggggctttcgctaaaacggataaaaacttaacgctttttgaggaactgaatattctgtgccgttgtatttcaacagcatactgtttttcctcactttgacttctttatcgacacagttatcttcttttaataattcgctgcgacgggaagtggtgaccgaattgatttgcagatcgttaaagccgtgagtctgggttttagcgacggaaatcgtgcgtttatcttcggaaaattcaccggtacagttaccgtcccattcgccgctatattgatccatctgcaacggcttagttaatttattcagtttgccatcttgcaggttatataaggttaatacgtagtccgcgattggattaacgcgcgatgaaccgcgatggtaggtgcgtatgccgaaggcgcggttctccgccgttaattgatagcgtgcggtgtcaatgctaatgttatcggtataaatcgcatcatcgctgatggctttttgatcgtagcggtgagcgattaacttaccggtagccgaatcgaccactaatacatcgacatcataagtcggttgatcggaatactgttcgggaatatccgaaatcagggtcatcacgacaatagttttatccggtgcatagggccagactttacagatgttcaggtttgacggcgctagcgttaattccggatgtagtgttttcgccaattgaggaataaagctctggcagtccgccaacgaataagatgaaaacataagtgaagaaagaagaaggaaaatcctgcgcatagtctgagtccctgacgctagccaaataaaataggcaacggtagaaagagtgtggaaatcaccgatacacggtaactcactgaaataaggtaactaaatgctacctgtctatggattattacacggatagagagagttacctaacggcgtaattatgaaaggggaaatattttaatcgaattttttatgccagatggctgtaaaataatgcggtgctttattaaccagaatacgtcaggttgcgatctgaaatttattaaaaccaagccaaggttgggttagttagagtatttagctagcaataagctttttccagcgtcaagattgtcttattccgcaaggaaagacttacgtagagcagaaaactgtattagtgtgatgagcctgctgttagagcactgaattgtcacatttcgccgcccatttatcgggggcagaataactaacgtgccggggttacccaaaagcagaataacaatgttgctgtgcgaattttagcatgactttacttatcggttggtaatgggttgaagaaggaatctggcgtgacgaaaatacgggttggggtcatttttggtggcaagtcggctgagcatgaagtgtcattgcaatcggctaaaaatattgttgatgccgtagatacggaaaaatttgaagtcaccttgttaggcattgataaacagggccagtggcatattaacgatgcgtcgagctatctgttacacgcggaaaaccctgcgttgatcgccctgaatcactcgaatcaaaacgtcgctttggtgccgggccaacgacagcatcaactgattgatgcaagtaatgccgcagcgttgacgcaactggacgtagtcttccctattgttcacggtacgctaggcgaagatggctctttgcagggcttgcttcgcatggcgaacattccctttgtcggctctggcgtagtcggttcggctgccagtatggataaagacgtgaccaagcgcctgctgcgggatgccgggctgaacgttgcgccgtttatcactttaacccgcgccaatcgtcaccaatacacttttgagcaagtgcaggagaaactggggttgccgctgtttatcaaaccggctaatcagggatcttccgttggggtcagtaaagttcgtaatgccgtagaatttgcccatgcggtcgagctggccttcagttttgaccataaagtattggttgaatcggctattgttgggcgtgaaatcgaatgtgcggtattgggaaacgatcgcccgaaagccagcctgtgtggcgaagtggtgatcagcgatgaattttattcttacgataccaaatatattagcgacagcggtgctcaggttgtgattccggcggttctggagccacacatcagcgataatattcgcgccgtagctgtggaagcgttccgtactctggagtgtttgggtatggcgcgtgtggacgtgttcctgacgcctgataaccaaattgtcatcaatgaaatcaatacgttacctggttttaccaacatcagtatgtatccgaagctgtggcgcgccactggcatcaattctaccgagcttatcactacactgattgaactcgctttggaacgtcatcagcaggatcaggcgttaaaaagctcgatttcactgagtgaacaagcgaaatagcctctatttatttcacctatgatgatgtgcgataggtgaaatggaactctgtaaaaagctgcctggtgcagcttttttattgcctaaaaatatgtggacggtaattattgtcagtatttgacattatgtcacttaatgacaataattcagaaatgaaacttacagaagaccagctcttacttcgagagagcaaaaaaattgtcgaagccttaggaaacacttttgcgccgctggtggaattcgtgctgcacgatttaacccatccggagtacgccattgtggcaattgctaataatttgtccggacgagaagtgggggaacctgctacagaactggggttgagccgcatagccgatcctaactttcccgaagtgctccaaaactaccccaatcagtttcccgatggtcgcccagccaaaagcacctctatcggtttgaaaaatagcaaaggagagtttattggtgcgctctgcctcaatatggatatttctctgttctccgccgttagcagcagtctggcgcagctgacgcaaacgttgcccaatgacattcaggaaaatctgcaatccccgcgtttggaaactctgcgtgcgcgattggaacaattcgccacggcctggaacaccacgccacgcggcctgacgccggctcaacgccgtgaagtggttcggcaattggccaaggaaggattgatggatttgaaaaatgcgcaaacagtcgtggccaacaattttggggtcgcgcgctccacagtttatacctatctcccaactgatgaaggaagttgaaaatgccccggctcgcaattggatatgacgatattgtacaggcacatcaacgtattgccgatgaagtagtcaaaacaccggtattcacttctgccacggcagacgcccaaaccggagcgtcgttgtttttcaaatgtgaaaattttcagcacatgggcgcttttaagtttcgcggcgcttttaacgctttagcgcagttaacaccagagcagcgagagaagggggtcgtcactttttcatctggcaatcatgctcaggccatcgcactggccgcgcgaaaactgggcatccgcgccaccatcattatgcctattgatgcgccagcggtgaaaattgccgctaccaaaggttacggtggcgaagtcattctctacgatcgctataccgaagatcgcgatgcgattggaaaacgattggcggctgaacgaggtttaacgctgatacctccctatgatcatccccatgtaatggctgggcagggcacggcggcgaaagaactgtttgaggaagtgggggacctggatgtactcatcgttcctttgggcggtggcggtctgttatctggctgcgccacggccgccaaggctttgaatccacactgtttggtgatcggcgctgagcctgaagcgggtaatgacgggcagcagagctttcgcagtgggaaaattgtgaaaatcgctacgccgcacactattgccgacggtgcgcagacgccatttctgggaaactatacttttccggtgatacaagaacgagtggacgacatacttaccgccagcgacgctgagttaattacaaccatgaaatttcttgctagtcggatgaaaatactggccgagcctacgggatgtctggcggccgctgtggcgtttggggaggcgctggacctgcgcggcaaacgggtcggggtgataatttccggtggaaatgtggatctcagccgctttgcccacttcatccagcaggaaaattaatctctgatattcacctgataaatcttaatagaaatccgccgccaggccatgacagccacgtagcctgcgccgacggccgggcctatcttttcggccagttgaccataattgctctagggaaaccgttgacgaatcagccagttgaatctcagttggcacaggtattcgacaatatagatcgcgtactgcttagttgtggctgcgattgcagtgcgttgatacggattcgggggtatctgaacgatgaaggattgtgcttgcaattcaatcaattatacgctcattgtttaggggaacatcggtcagtgcgttgcgtagtacccgtagccgaattgcactatggattaatggtcgaaattaaggccattgctcaataagtgcactaaatattgtacctgtttataaataaggttgggcgccaggcgcagatgagtaggactggcatttatctttatcatcattttattttatctatcatctgtttttccatagtagacggcaaaacagatgcctctccccgagtctttatctctaagatttttatcgtcagttaatttataaccaattgtaaataaagctatatttttttgtttttttaatggctggttatgatgaagtcgaaaccctttaattttgactgccctcaatgaagaaaatagagaaagtttcattagtgtaactaaagtgtttattgcgggttacaatcggagctgcaaacatgatgctggtcatcatttgcgcatttcgcattattttcctgttgtattttatccaccatataaatgctgtgcatatatacagtatattgctgtacacataatgaaaattaattcaaggatgagtaatatgaaaacttcaacaaaaacacagtaccctattattttagtacacggcctatttggttttgacaaaatgctgggctatccctactttttcaaaatccagccagcattggaagttgccggtgcacaagtgttcactgcgtcagtttctgcaaccaattcaaatgaaacgagaggtgagcaactacttgattttattcgatatattttgaataaaaccggagcgaaaaaggtgaatctcatcggccacagccaagggcctttagcctgccgttatgctgccgcgatgcgtcctgacctggtggcgtctgtcacttcggttaacggtgtcaaccacggttcagagtttgccgatcgggttcgtgaagcctttgtcgaaggtggcctgcctgaatcagtggctaatttggttgtctctacattcacaaatttaatgtctttactcagtggtcatccagaactgcctcaggatgctattgcgtcactggatgcattaaccacgaaaggcgttacggaatttaacgccaaatatccgcagggtctgccagagaaatgggggggcgaaggcaaggaagttgaaaacggcgttcattactattcatggggtggatttatccaaggagggattcttgagcaagggttgaatacagctgatccactgcatatcgcgatgcgcgttggttcacaattctttattagagaggcagaacagaacgatggcatggtagggcgttttagtatgcatttaggtaaagttattcgttcgaattattcaatggaccatatggatgcggtcaaccaaacggctggcgtagtgccagtgcatcttgatccggtgaaaatgttcgtcgaccatgcagcattcttaaagtctaagtctctgtagtccacttcgactgagatgaaaaggggagcgttgttgttaagtcacgcaacctgattagtgacgttgtaacctaatcgctcaactattcaactcaaccataaaagagaaataacagagactcccctgcggccgagaaggagtctctgaaaacgattacaggtgttttttcgcgaagttaacaatatcttgcttaaagtcgctgaccttcttctctggtgatttcttacataactcaaccaccttcggcgttacaacggtatcaatttcttgatagtcaacgaaatcgccttttttatattgcgtatcgtcattcaacatccagaatacgaccggagtgaagcttttcgggttcaggtcgataaactctttacagctcatatccgctggcgtagtcgggctggtagcggcagcaaatgacgcggtggctgcgcacagcagcaaaccagccaatgggatattacgtaatgatttaaatgacatgcctatctccttgcggtttcggatcaataatttccaatataactcaggttctggtttatatttcgagtctaagcatggaccaataatttaaattaggccagtaattcacttaatttatctgttgcgccattcgactacttatcctctacagtaaatattcaatttatagttatgcgtcgatattatattaattcgcatggttattattgggtttataatttgatttttatttgaaattggctaggagattatttttatttgttagtaaggcttattacgttgttttcagtgtgatatttaattcggataagcgtaatgccaggctccggatgctattattttacagtttgaactgaggtgagaatagcatggggtgggaaacggaagttctaaatttcaataaacggactaaaggtaaatcatgaataaagaaaaaccaaacatggcactgatatttatcattttacttacagtgagaattcatgctgaggctcacaacattaataatgtcatccctcgttctgataaccgagaacacttatcatcgcgcgtattggaagaaagtaatcaggctgtatctctctataatattggtagcggcacgttggtctacagttccgaatacaaacaaaaagaatatctatctgctgattatgcatataatcttaatggaggatggaaagaaaatgcaaactggaaatatatttataataggaatggtacggtatcatttaaaaatagatactcaggactatgcctacaatattacgggacagaatatcaggtcattgaagatacctgtgatcccttattgagaactcagcaaatcaatctggaactggtcagctctggcggaatgcttatgcggtttaatagtaataatgaatgcctttatattcatcctggcatcagccattactatgtatacagtgataaatgcgaagagatcaatttttatcattactggaccatcgtacctccgctcaataactgagtgaatccacagggagtgaataatgaagagtgttttatctaggatgtttgtgtttggaggcttgtattggtcaacgttattatcagcctcagtgacagactaccaattagcgacctggaatattcaaggcgcgggcagcggcgcggccagtaattctaaatgggttagcggcattgccaatatgtttttgcgtgaaaatatccaggttgttgccattcaggaggcgggggccagaccgccttccgcatgcccttatcccagtccgggaaccccaggaggcattgatttacaacgaatcgccggcggggcaccaaatagagtcaatccacaacggcgtggtgtgatctccgacgttgaagaatcgctctggcaacccggcggacgacgtggcggaaatatttatatctatcatatagatcatgataccaacgcgcatcgggttaatattgctattgcctcgcggattcgggcggatgaagtccttattattcctccgttggaaaccgggcctaatgcacggccaacattaggcattcgaatcggtaatgactatttttttagccttcacgctggagcgcatcaacataatgaggctgcgatgattgtgcaattcattgataactatatggctaacagcgtattaccgcggcgtgcggaggcaacttggatactcatgggggattttaaccaatcgccggatagtttacgcgccagcttgtcattgcctggcactacgatgctgaatacttaccacgttgttgatcccaatgtgccaacgcatcagggggggaatacgctggattacgccgtgctgggggctgcaaccggtacggttaggctgtttgccgtcccgcttatagctgcgatgatgacttatatgtccgatcacattgccgttcgatttaatcaataataccgaattaatacacaagactgttcagaaaggcgcttagaatctatgggctaatctactttaatatgacggatagccctttttttaaattgagagtaacggttgttaaagttaataatgttggatttacgaaatatatcactactgtaatgtttaatgctgtaattaatactaaaaatttctcaacaatacttatttaaacaaagtgtagtaataatggcgatggaagaataggttacgttagaccatttaaaaagtaaggcattagcttgggtgtaacatattgattatagctatcatatttataggtaaaaacaattctattatttctcacaacttaccttgttctcagcatccctttgggttctataaaaaaacagtcacctatgctatcatttacagtaattatcattaataaacttaatgaaacgttattgttttatttacatctttaaatataggtgagttaattttatgagtttacgttatttttaccgaaatagcctgcggctcttcgccaggagattagcgggcaactatcgtaaaagtgatcgatctcataaacatgccggtaatgatcaactgattaatctgcatttggaatcactgcttaatgctgcaactcaggtagcgattatcacgaccgatctggataatcgtatccagattttcaacgctggcgcagaaaagatgtttggctatgaaaaggaagaagttttaggaaaattagcgacggaggttatctatgtcgactccaacaaagccgagcaaagctgcgtaaaaaatctgttgaagaaccaacctgaatcaagcgaatggctttatcgacgcaaagacggtgatgctttttggggcgatttaagcatacacgttattaataatgagtataaagagcccattggttatgtcagcctgatctcagacatttccgagcgtaaagagctattgataaagctggaaaacagcaaaagaataatggacaagttgacgcgaaacatcccagcgatgatttatgcctatcatctcagtgaagcgggagagtcttattttaagtattgtagtgacggtatccataaaatattcgggttgtccccagaacaggtgacgaatattccgaaacaagataatccgatattctcgctgattcatcctgaagatatggccatgctgcaagaagaagtcatggtttcacgccgtgatttatcggtttggcgctgtgattttagagtcatattgccggataaaggaatgcgctggcttcacggcgaatcttttcctactcgtcatgatgacggatcgacgatgtggtatggctcgtttttcgatataactgaactgaagcagtctgaatcaattttaaaagccttagcgcagacggatgtgctgaccggcgtttccaaccgtcgtcatttcgatgaggtttaccatcaaacctggaaggtcagtcaggtatccgaagagtctctttccatattaatgatcgattttgataacttcaaaagctttaacgatcagtatggtcatgctcgcggggatatttgtttaaaactggtggtggagaccttgtcttctttcatcagagaaaataccgatatgattgcgcgttacggcggggaggagttcattgttctgctatcaccaagcaaccatgacgaagcgcttctggttgctgaacggatgcgcgattctattgagcggttggatattcctcatgcgatgtcgcccaaaggtaaggtgacgatcagcatcggcgtggcgacgatggttccgaagaaagagggattatccgccagcgatatgtcggatattgcagataaagcgttgtatcgggcaaaacaggcgggtaaaaatcgtgtggaggccgtgtcgctctgaggcgaactgaaaatgcgaaactggcgttgcgtcaggcggagagaaaatatcggtttgagggaaataaatggcagagcaacagggagtgctctgcccgtggtattaatcaggatcctgagcggcgcgcagacgttcctgctcttctgcaatgaccgctttaatttcttccagcactgactcgacatccgctgcctgagtactttctgcaaacactccggttagctgagtgtcaggacgaagtttgccatcttcatacagcgcccacatttctttggcatattttcgccctaataactcaggcgcatactggccgtaatagttggtcatgttggctacatctcgttccagcatggatttggcatggttattggcagcggcgttaacgacttgcggtagatcgatgatcaccgggccttccgcatccattaacacgttgaattcagacaaatcgccatgaactaacccggcgcacagcatgcggaccacggattgaatgatcaaggcgtgatcgtgcaccgcctgctccggcgtgagaggaacatcgctcagacgcggtgcggccgagccgttttcatcggttaccaactccatcaacaatacgccgtctagacaggcatagggctgaggaacgcgcacgccggcgttggctaacacatacagagcgtcaacctcggcggtttgccaggtttcctcttgctgcttacggccaaacttcgagcctttcgccatcgctctggcatcgcgactgtttctgactttgcgaccttcctgatactgtacggcctgcttgaagctacggttttcggcttctttataaactttggcgcagcgaatatcggagccgcagcgaacgacatagacgtcggcttctttaccacttttcaaacggcggatgacttcatcaaccaagccgtcatcaaccaagggttggattcgttttggaattttcatggcgtccttttaccctatttaagcccgcgatggaatggttttggtcgaattttcctccagtttaccatccgccatctaccgcaggtggtatttaggggatcaggccgcgttaaattgcgcattgtacaatcgggcataggcgccttgctgtcctaaaagctcctgatgattgccttgttcaacaataccttccttatctaccacgatgattcggtcggcgttttgaatggtggccagacggtgggcaatcactaacgtggtacgaccacgagatagctcaatcagcgcctgctgaatcgcctgttcggtggcggtatccagggcagaagttgcttcatccaaaatcagaatcggcggattttttaggaagattcgcgcaatggaaagacgctgtttttggccgcctgacagcttgacgccgcgttcacctacccgcgtgtccagtccatcgggcagggcgttgatgagttcatccagtttggcctgttgggccgcgagcatgatttcgtcatcgctggcatccagtttgccgtaggcaatgttttctcgaatggttccgccaaacaggaagacatcttgttgaacaataccaatgttatgacgcaaggattgctgcgtcatagtttggatatcaataccatcaatggttatcaaacccgaatctatctcgtagaaacgtggcagcagagagcatagggtcgttttacctgcgccagacggcccaacgaaagccacggtttctcctgcgcgaatacgcagattcaagccggtaaagatagggctttgtggcgtataaccgaaagtgacattgttataacaaatatcaccttttaaatggccaacctgctgtgcatctgggctgtcctgaatgtctggtgcagtatcaatcaactgggtaaaacgtttaaaaccggcaatccctttcggatagctttctaataccgaggtgattttagccaccggccggaagaagacttccactagtaacaagaatccgacgaaaccgccgtagctcaattgcccctgaatgacgtaccaggtgccgaaaaccatcacgatcaactgaaccaaacgggtactcagatagctgagcgtcatgctggtggtcataatgcggtaagcacgtagcttggtggtacggtagttttcgttatctttagcaaacagtttcttttcgtgagactcatttgcaaaagccttcactacgcgaattcctccgatgctttctccgattcgcgcattaaaattgcctacctgaccaaatagttttctccatgtatcagtcatttgcgaaccatagcggctgaccatataagtcatacagggcacgataacaatggtgatgagggccagaggcagatgcaccatggccatcaggataaaggccccgataaaggtcatgattgcgataaacaaatcttccgggccgtggtgcgctatttcaccgacttcttctaaatctttagtgacatgggtaatgatatggccagtttttgtattgtcataatagcggaaagacagtttttgcaggtggctaaacgcttgtcggcgcatatcggtttctataccaacgccaagcgcatgaccccaatagtttacgacggccatcaaagcagtattcaacaaataaattaagagtaagccggctgcggcccatagaatcaatgaccagttctggtccggaagcagtttatcaatgaaggttttgactgccatagggaagcctaactccagcaaaccagccagaatggcacaaccaaaatcgaggaggaaaagccctttatacggcgtgtagtaagcgaaaaaacggcggagcatcaatgcttccttaaagtcggagagagacaaatgggtgagttagtgaataaatggctcattaccagttcgcagcataataaatttaaatgattattaatagcatcggttcccacagatggcaggttagacggaaagcgtggagttggatatgctagccgggcagacaaaaaaagaactgggtaatactgccgcgtaacccgatattatcgtggtggttacgcgatggaatcattaatctaaactgcaaaaaataataaatagaataggaagttcttatttgcttcccgcccaactgtaaggctcaagctctacgtttaacggcggctgggctaagttattggcaaaattagccaacgttgccaggcttacgccgaaaatgacttccaacgcattctccatattgtatccggcttgtaaaaatgcctggtattcaggttcagagacatttccttggctacgtataatggcccgcgtaaatgcggcaatcgcgtttaaacgatcatcggctaaattatcgccctgacgtaaagcttgagcaatatctggggcaagcaaatcgtttctatcaataaccgcgcagtggccagccacgcaaaaatggcattcatgagccgtagctgaagctaatttaaccacttcgcgttcgctttgattaaggtctgcgctgccgttgacagccgacatttttgtataagcattcaataccttgggcgcatgagccaaaacgccaaataaattgggaataaaacccagctcattatttacatgttcaaatatagggcgattttctcggctgacggttttaatggtatagggtgttaggcgattcattattggcctcctgtcgtctttcagatctactatttttcacatctactaataatagatgaagaatgccggttctttttttaaataaactacatatagcatttttagattgttttagttgtcaagctattagcctattaaaagtcacctgatgtgattaaattttgtcggcgaaactattaattaccataaagtgcaaattagatgactatcgtcacgcattggctcatttttatccgttgcagattcttccggctattgagtattgttaatgcccaatgatcaggagctgaataatgaaactagaattaaccgatgcaccaaaacctgaagatattgaggctattagtgacggtttgagagtttttaatcgacgttttgttggtgcgcaacgcagaaatcccttggcggtatttattactgatgacaatggcaaaaaccagggcgggctgaccggttataccttaggcctatggctaaatattgaaatgctgtgggtctccgatagtgtgaggcactctgggatgggcaccagattgattcaaatggctgaagaagaagcggttaaacgaggttgtcagttttctcaggttgatacttttagcttccaggcgcgaccattctacgaaaaacagggctatcagctacaaatggcgttaaataattatctggatacccatcatcgctattatctcacgaaagcattgtcagttagttagggtaaatcggttgagtatccgaaatatgtttttggcgtaatgatcgtgccgacagggatcaaaacgataacctttgcgcctcatcagaatcgaaaggttatatacggtaagtgatcccgtcggcattggggggaaatgcagctactatatcgacagccttatttgttcgataagtcgtaatgctgattcttagctaacttaagactggggctgcgctttatctatcatatggaaatcgcgtagagcaacgtagggatcccaatattctttgacgttttttaactgaccgtcgggtgaaaccgtcacaatactgataaagttctggtgataaggctttttatggtttttcgattttttatcttcagatgtagcggaacgaataaaacctgaactgctgtattcgaacacgtagactccaggtttatctgtcgctaattgggtccaggtttgaggtttggaataacgtaagtcctccagataggcacttattttagtgaaataggccgtcatcgcttcgcggcctcttgaacctcgcgaaaatattgggaaatcatccaccggcgcataaaccaattcgaactctccggcgggcgtaaaatattttgcgacgttatccggattttctgaccaacgattcaggctttgccaaaagaatatggcaacatcttcagtgctatagcctgggagcagatagtatttaccctctttacttataatatgatctgacagttgttgtgcggccagggcggtagaactggctgatattgcggtgaagatcaataaacattttattagcttgctcatgagaaaccccactattttgtttagacagccagatgctgcatttttattacggctttaattgtgctgccagactgagagtcagccatggcctgattaatttgatccagggcgtaaaaacgtaccaatttgtcgacaggaaagcgtccctgctgaaataggctagccaatcgcggaatgaatgatatcggtgcggcatcacccataatggaacctcgaaccaaacggccacgtagtaagtgcataatatttaatggtaaagtggcatttggtgcgaccacgccggtcaggacgcattggccgttctctgccagagccgcaattgcgctttccatcactgccgggctacctgcggcctccaccacgtagtccactcctcggccatcggttagttcttgaagcagcattgggaggctatttcgcgtgcgatcctttgaggaatcgatactgtgagtggcgcccaggctttttgccagcgtcaaccgattggctttgatatccacggcgataattgtggtacagcccgctaaaactgcggccatgatagcggcaagcccaacggcttccatcccgaaaatagctatcgaggaacccgcctcaggtttcaggctatttaagacggcaccggcgccggtcatcatcccgcacgccagcggccccaaatattccagaggaatggttttatccacgggcaccacgctgcggacatttaccgtggcataattggcaaaagacgattggccgaaaaaatggctatgaatggcttcgccactcgtggggtcttgtagcgaaaccgatttatcgctgcgactggcgtgccagttaagtggccaatgttcacggcaataggtcggtaaaccgatatggcatttttcacattctccgcaggaagcaagcgaaagcacgacgtgatcgcccggttggatatgcttaacaccagaaccgacgcgttcaacaatgccagcaccttcatgacctaaaaccgcaggcagaggtacattgatcacttgttggtgcgatgcaatgtcggtatggcacaggcccgttgcaataatttttaccagaacctcattctctcgcggttcctccaaccttaattggcggatctggagcaaagggttactctcaacgctaacggctgcatgaatattcatagtgttattcctaggtcatcaatatctgatcagaatctttccacgtatgccaccttggcgtatttgctccaacgcggcgggcacctgctctaagccaatagttcggtcgaccacgacctgcagcgtgttgttcgccagtttttccattagcaggcgcaggtccgatagttcgggtttcatctctagattcaccaggcgaatatgctgggacatcttgagtgacgcggaacctatggtactgatagcggtaccctgcggctttagcagaggaagcagctgagcaaaggcatctggagggtttacaagatcgataattccgtcaattccgttggtatagcgcagtaaaacttgggtgttaaccgaactcttatggcgatcgataacattgcaggcaccgagtttatgcaacaaagtcgttgcctctgtagcggcaacagcaatgactttgtaaccgacctgagcggcaaactgaactgtaaacgtgccaactccaccgctggcaccgaccagaagcacgcggctaccggagggaagattcaatgtgttaacggcctgccaggcggtcattgcggcaataggtaatgctgaagcttgaaccagatcgatcagattattaacccgcaataacatcgcatcttcctgaatgacctggtattcagcgaaactcccgtgaccaatttgatgatgtaaaaagttgccgataaccgcatcaccaaccaaaaattttgtcacgccttcgccaacggcttcaacaatacccgagccttccgcacctaaaatcagcggaaaatgatggggctttttgccatccaaaaaccctgtagcaatgcgccaatcgatgggattgagactagcggctaccattcgcagcagaatttcacctggggctggagtgggtttatctagcgtggctagtttgggtgtgtcagaaaatgaatcaatcataaccgcttccatagcgctctcctttcgactgcgacgaggttttttatggtaaatgagtatatttgctggctaatcgcggcagaagaggggtaaataggaaggactgtctcgatttttaggataatgcaatgcagaaactgatgaatctggatttgaacgatctgtattacttcacctgtgtcgctgaatttggcggttttagcgccgccagtcgcgctttggggatttccaaatccagactcagcgcacgtgtgttaacgctagaaaagaatcttggcgtattgttgtttcaacgcacaaccagacaggtgcagttaaccgaaattgggcaaaacattctggaaaactgcaaggccttggtcgcagaggctgaagtggtgcaaggcgttgtttccaattcgcgggccgaggtcgcggggctggtacgggtcagttgcccgccgctggctgcaagacttctgctagcgccttatctatccgattttctgcagcaataccccaaggttagggtgcaattggtcacttcagatcaacgtttcgatcccatcagcgataatctggatgtattaattcgcctgcgcgctgcatcgcaaatggacgaaggattggtctcacgcgtactgggtcacagccagcgtattctggtcgcctcacctgattatcttgctcaggccggtgctttgatggcaccagaagacctgattaaacaccagactctaagcctgattgattcagagtcggtacaacaatggccgctcattggcccggatgacaagttggagaatattcagattcagccccggctaatgtgcatggagtggagcgtcatgctgcaagccgtttgtcagggattgggcattgcttctgtgccggacatcgcctgccaaaaagagattgccagcggagctttggtgcgcgtgttaccgcaatgggcttcaaatccgctagtggtgcatgccgtttttcctacccgacgtggaatgctgttatcggtgcgcgtatttttggactttctgattgccactatgcctagggcgctctcagctgataagtaagttgtggggtagcttcgtgcgctctccgacgttactgatatagttaatgataagagttctgtctattacgttagccagccttaatgcaggtatacctatatgtcagcttcgtcaattaaaaagctatctctgtggtcgttaacgtctttggtagtaggatcaatgatcggggccggtattttttcgcttccggcgacgtttggccgagctaccggcggtttaggggcaatgattgcctgggtgattgccggtggcgggatgttaacgctggcctttgtgtttcaaacattggcgcagcgtaagcctgagctggattccggcgtgtatatttatgcgcaaaaaggttttggtgattacgctggatttgcttccgcgataggtttttgggctggagcctgtattggcagcgtgtcctattttgtactgataaaatcgacgctgggggcttttttccctttattaggtgacggtaatacgctttcggcggtgttgattgcttccttaatcctctggagttttcattttatggtgctgcgaggtgtgaaagaagccgccaccattaataccatcgcgacgttcgctaaagtcgttcctatctttatttttattgtggtactgattttcgcctttaacagcgatatttttatgcagaatttctggggcgcgccggtgccgtcgatgacggcagatatcaaccattgggataattacggttatgtcggccatgcggccacggaaatagacgcgtcttcaacctcattatttactcaaatacgtagcacgatgttagtcacggtatttgtttttgtggggatagagggcgccagtgtttattcgcgctatgccaaagaacgcaggcacgttggtattgccaccgtacttggttttatcggggtactgtgtttattagttttggtcacgatgctgtcatacggcgtgttactgcgccccgatttagccagtttaaggcagccatcaatggcgggcgtgctggagcatattgttggccgctggggcgctatttttattagtatcggtttaattatctcggtgatgggggcttatctttcgtggacgttgctggctgccgaagcgctgtattccgcggctaaaagtcatattgtgccaaaaatctttgccacggaaaacaagcatggtgtgccctctgcggcggtgtggatgtcgaatatttttattcaatttttcttaattgtcaccctattcacagaatatgcgttccagctagctttagagttaaccagttctctggtgctgattccttacctgttggttgcggcctatggcttaaaactggcatggcgcagggaaacctatgaaaaggatagtagagagcatagaaaagactttttgattgccgccatagctacgttgtacgccattttgatggtgtatgccggtggactgaaatacgtattactgtcggccgtcatctatggaccaggcactttgttgtttattttggccaagagagagcagcataaaccggtatttacagccgttgagaaggttttatttgccgtcgccattgccgcggcagcgggcgcggtttatggtttggtgaccggcgccatcaatatataaatacacggcactcaatccaggataccgcagtgtagagcccaatagttcttctcgctgctatattatctttagcaacaatcacttataacgacagcctctgggggcgttcagagcctgagtgtttcacgttcatagcgatgggaataccgcagaatgtttcagatctcaacggataaaaatgtgctggatatcgagcttattcatgattttctgtcccgccagagtctctgggcacaggggatttcgcgagaaaaagttgaacgttctctttgcggttcgctttgctttggcggttacctgagcggacggcaagtggcgtttgctagagtcatcaccgattgtgctaccttcgctaatctggtggatgtgtttgtattacctgaatttcgtggtcagggttatagtaaactgctgctcggtgaggtgttttctcatccggatttgcaggggctgcgccgttttactttggctacgtcagatacccatgggctttatgctcaattcggttttacggcactgagtcagccgcagactttcatgcaacgttactctcccaatatttatcgagagtagcttgtaaaaaatggcgtaaagtgcggaactcattcgcacttaatcggcgagtgatggagggttaatatattaccgttattaatgcgttccattatgcgctgaatttcgttccggcaggggcttgatctgtcacctagactacgacaggatctgtgaccattaagtggtcagcacccgcgggtaaatgaatgaggtcgttaccacttaaataaaaaatggctggtgaataatacaccggtaggtgctttcttgaaaaaacaacgaaactctgtccccgcgggtgattacacggggggaataggtgatgcgcagtttgcactggtcgtgttgctggcgacttctgcggcattagtggttgtaactttggctgtaattttatggatagtttgagcaattgttgagtaatggaggatgtgtggataagagtttatttgatgataataaagtcattgccttggtaggattattaacagcggcgttaattgccgtcagtgtgatgtttactctgacttatatgacggaacgccagcgtaatgaagctaaagttgtagatatccaaaactgttatatccaaaacaaataaccctgtttagatgccagagccacactgccgctttctgagggccggggctaatatcatctcagggaaaattacgcctgtttttgatggatggtgtgcagcggcggggcgattttcaaatcaatgtcggcattctgtcgaaaatcgtagggtgtaatgccgtaacgcttcctgaacatataggtaaagtgcgactgcgaaccaaaaccaaaatccaaagcaatatcaaaaatagaagtgtcactgcttctcaattgataaaccgcgcccgccaatcttctttcccggatgtatttacccagagaaatgccggtcacttccttgaatattttttgcatatgccacagcgaatagcctgagtaagccgccagctcctcaaggtggatgactctaccgaggtgagtttcaacccatttactgagggcgcagactaacgagagatggttttcttgttgcattatttagtctgttccgaagataagtagtgatgcagtatacacaagttaaatccaacaagacaaaatcagggcgccttcctgattagcatatatgattaaatggcacgattaagtaaaaaatgtatcagctgcgagagtaaaaggagtagtgtcgtttgtgggggattccccctgaggaatttgtccgttcccgtaagaaaaaatcaaaattgatgaggtgatcgcatgttgataacggtgattatgactctgatagcggtagttggtgttacggtgtttctcatgatgccagtgatgattttggataaaggcaaacgtgttggaggtgatgaactgtgagaataggattgctgtgatgattgtctacttcgaaccaggcgaactgctcatctagcgcctggtttttttatactttccttttggttcctcgtcagtttaagacgctcatttcgctacaatgctattgattttcagaaaccgcgcacaggggtaaacgctgcgtcaaatatcccatttccaagcaatctcaaaggttaaccgtggttaaacctatacagattattctgatgacgacaccccgaataaagaaaagttgttgcgagcgtgatattctttgcctactgagctgcaaattaggaattttattgtgtctgagattttaacaaacgatcaagaattggtatccgatctggttgcctgtcagttagtcatcaaacaaatccttgatgttattgacgttatcgcgcctaccgaagtgcgcgataagatgtctcatcaactcaaatccattgatttctctactcatcccgcaggtgccgatccggtgactaaacgggcaattgagaaagccatcgcccttattgatctgaaattcacccaaaactgaaaaaacaacccgcagtatatgcgggctgttagtcaagttactcaatcaccgaggtggtttttttcagtaatgggcagtcggtgatgccgataaagccattatcgccattcaggaattgtgcagtaacaatacttctggctgtgaggtacttacactgtaggcctaatccagcagcgttcttttcgctgccgataaggacaccatagcctgaaaaaagcagtgccaggtaagcgaccagcaaaatgagtgcaagtctgaaaagggtcataaagagctccataaattgagatgtactcaatctgttacaaggttgagcacaactctagctgaaagattaaggtcagtttacgctaaaaatcctaaacttgcggagtagggcaaggcgtttaacctgaggaataacatccgtagcccgggcaggcagagtgatatagagaatgaccgttcggctatgacccgttgaggctggctgaagtataatttatcaaaataattaaaaggtgcctgatgtgaacattaagaaacttgttgcaacggtgatactgatagccgtttgttgcttgttttatctattagcgttagacagttactgcgatcaaggcggtaatttctctaatggtatttgttctattaccgctattgtcccttggtaatgttgaaccgcgatctggcaaaacagaggcataattattgcccgttgccgtctttcctctgaacaagtgtgctacgtttcagtattagtttgttttctgaacgcgccattgggcgcggcgcagtgataagatagcgttctagtctcgcatgtaatagggttgtcaatgtacgaaacaggtatgggcgcagtgaatatcgcctcaattggattctcatcgctggtggtcgtgttctttttggtcgtctggttctttttaagccgagccagcgttcgcgccaatgagcaaattcgattgcttcaggaaatcactgaacagcaaaaacaacaaattgagttactcaatacgttagtgcgtaagacctccggcgacggcaaggatttaccggatggtgatacggtagaagtgctggattttaaaggattcattcctgagcgttaatgctgtgaaggcactgtgaccgggttgcagtgcctgcccgatgtgctggtttcactcctttttctattatcctcctcgcggtaaaaattgctgcttcagcgttattgttcctttcatttatacattattagctttaatcttaaaccgacgctgattgtcataaatgtgtcttatttttcccctaatgtagccggaatactccagcccaagggtaaacctagatgattaaatggtatgaagaaagcgacaccgaagtgaaccgaaatattgcactgctgacgggagaagatccggacaaatggtacccttacggcggtgtgaaaggtaaagactattgcaagaatccctccgatgcctggccgattatctgcgccaataaaataggcattcactctcctgaaaatagcgacgataaccactggcaggcgcgtatcgccacaagccagggggaatggcaagcccgaagcaccagcccattacgggcggcaatgatctgttttttattgagtcaggatactgagaaagccctaatgtagttatcgagtaaatccgccagaaaatctggctgggtagtatgcgttatccatattttagccagtcattttgcgatggagctgatcatgaaacgtattattaaaggggatatgaatttatcccacctcgttattgctcatacggcgattgatcgccaccaacagtcctatggcgatcgtcgtcaaggctggccttcaacttatctcatccgctataaaaataatcgggtcgccgttgaagttgtcactcgacgtcagtcttatgttgccacattaatgataggtgcacgtaatctgagtagattgtgcaatattccatcgctttatccttaattaattgcatcaatcacatctttgccgtggttgatactcaaacatcaatggcattgatataacgaattttgccaccgggtttatcacaaatttcagactgataaacccccattttccccgcaatgaaatgccttaatccttgatgctaccgggtttaaatgttaaaaagccgcgcggcttcatttacggacagtcaattttctcgtttaacgggaggaaattgcggcagaggatacaatgcaagagcagttacaagattcgaccctaaaacgagggttaaaaaaccgacatattcagctgattgcgctaggtggcgcgattggtaccggcctgtttctgggcatcgcgcaaacgattcaaatggctggaccttcggttattttaggctatgccatcggcgggattattgcctttttgattatgcgtcaactgggtgaaatggtcgttgaagagccggttgctggttcatttagccattttgcctataaatattggggcgattttgcgggcttcctgtcaggctggaattattgggcaatgttcattttggtgggcatggctgagctgacggcggtgggtatctatatccaatattggtggccggaaatccccacttgggtttctgccgcagtattttttgtcgtaatcaacgctataaatttaatcaacgtccgaatgtatggtgaaaccgagttctggtttgccattatcaaagttgccgccatcatcggaatgattgtatttggcgcttatctgctggcctcgggttccggtgggccaggggcgtccgtcaccaacctttgggcacatggcggctttatgccacatggtatcagcggcctgattatggcgatggcggtcattatgttttctttcggcgggttggaaatggtcggtattaccgccgctgaagccgaagacccgcgtcgtagcattcctaaggcgaccaatcaggtggtttaccggattttaatcttctacatcggttctctgtcggtattgctttccctgtatccctggataaaagtggttgagggtggtagcccgtttgtcatgattttccatgcgttagacagcaatttggttgccactattcttaacgtggtggtactgactgcggccctttcggtctataacagtggagtttattgtaatagccgcatgttatttgggctggcaacgcaaggcaatgcgcctaaaatattgaccaaggtgaataagcgcggcgtaccggtgttatcaatcgctttgtctgctttggctacctccgctggcgtattaattaactacatcatgcccggaaaagcatttgctttattgatggcgctggtggtctcaacgctggtgattaactgggtcatgatctgcctggcgcatttgaaattccgcgccgctaaagtgcgtgaaggcgtagagccaagttttaaggctttgtggtatccgtacggtaattatctgtgcctggtgttcctcagcctgattctggtgattatgtacatgaccgaagggatccgtatttccgtgcagttaatgcctatttggcttggggtgctgtggatcggttttatactgacacgacggaaaaaagccgaggcttaagatgaaaccggcagtttgggtttattttctcatgtctgccgtgcgaatgttttgaaacctgacgtaaagcccgctcatcagcgggcttttttgtgagcgaaatcgataaatagtcggtgctgaatgcgcctcaacgctttgtcacgcggataagaaatagagacgaagaaagacggagtggatagaggcaaaaggcgttagaggcggcggggggctattttccgccttaatttcgggttaatttaggcgaagtaaagaatatcttgccgagtgtgcgagctaataaatcagtgcaccgagtgagtgcactgctatttgagaatcattcctgataacggcgtagttatccattaagagatctggtgcaaattggtttgagatattacgccacagcagggaatattatctccatataatcaaatatgattagaactgccagcgaagccaggcaaacaatacgttaccattattataagtccccggaatgtaggtggcttgcagcgaaagcttattatattcgacggaaaccagcggcaaaggcaatggcatcggaatgtaatagtactcatggcgcgcagtgacgctgagagtaaagcccgcgccgaaacgccatccgtccattgctcctggaatccacatcttctgaaagccataaccaataataggctcaactttattgtgtgaatccataaaagccatggcatacagagagtgccagtcgttatcttcatcgtatcgatatttgccaaagccaaagccccacggattctcgttatacgagtctgtcttttccttgtcgtaggtccaacggttatgccatgtcagcaccggtaggtagaattcacgccccggcgcatcccaggtcagcgagacattgcctttaaaacgttcccacaggccgccatcttcggctttaatggcattaggttgattggctaccggtaacgcttcgctgcatgccggaaaggccacagacaacagactcggcgcaaggagagcagcacctatagctgcaactttatatttcataatggagtctctggtatcgataagttgaatagggggagtttctgccccttgtgcctatcaaaggtaaaacaaattttgccgattaattattattgaaaataatccgactattagccgttttgattactttcataggtgtctttatagctagtttaattaatttagtaaaatacatcgggctttaaataaaggcgggtattgtactgaaaaaaatgctgatgaaaaggaagaaatatcctatttacccttttcatttagctaaggtataagaatcactcggtttttcaggtgcgtttacttgattaaaagagtccgttttatgtgtatttatgccactagtgataatccattccattgcaccatgatagtgcgcatccattttgattaaatagaataataaacttccgttaatgatgaggtactaaatattgattaaatagattccgatattttatttattattcacatttatttttttaggtaaatatatttgtagtcatttatgcatcgtaacgtttttttgtgaagacctgcggcttttagccgttattgtcatcagattgtcataagcatgagatttcgccaacctgagcataagtaaggatttaatcaactaaaagttgaaaatttcaacccggagtgaggtgtggaagggctgagggctggcagagcaggtatattctatttttatatatcaaagaccaataggctttattaaaatagatttgttccgcgtagaacggatagaaaatcgacaacgtttatgacgtaataggtattataaaaatagttagcaagattgttaaagttaagcaaaaaaaacgggttaaacagtataaaaaaatagagcagaaaatacgatgaccttcaacaaatttcagcatatttaagcagtgtttgtgatcgactggcccaaatatgtgcgacaagtacatcgttgattaaaaatggcttgccaacgaattcagagtatgtgataacgcatatgggtaaaacgaggtacagttctgtatatgtgtggcattttcagtaaagaagttctgagtaaagacgttagcgttgaataccgcttctctgccgatccttatcttagtgcctcaagcagtaacgactctagtttgtctatgtaacgcctccgggcgagttaaacaatccaaaggaaatactcaagatggctaagattaaaggtcaagttaagtggttcaacgagtctaaaggtttcggtttcatcactccagctgacggcagcaaagatgtgttcgtacacttctctgcaatccagggtaacggcttcaaaaccttgggcgaaggccagaacgtagagttcgaaatccaagacggtcagaaaggtccgtctgcagtaaacgttactgcaatctaattcagctctagctgaaaaaaacccgccttggtgcgggttttttcgtttctatagtaatccgttttattaataattaaggcaagatgattaagccggaatattggtttctgccgctgatccctggatgggttggatctatggctcgctgctggctattgcggcggaaactggtgtatttaaacgcagggacaagctcttcccgattctcgttggccgaaccggctgatttcggcggcatgcagtctgccggtgtacagatggtgcaacttcccgcgcggtctatctgatgaaaacccaatgattgcaactgatgctcagcaatggcggtaaggttgagatgtcgatagcggggagaaataaccgtttttgggatattcatattatcaataaatcgtgccactaaatcttcggttacctcgtaacaacaggaacgtgccgctgggccaatagctgcaacccattcatgcggcgaatcatcttgcgatatacgttctgccattcgcagtaaaattccatccaataatccgcgccagcctgcgtgagccacggcgatagcttttccgtcccgtcggctaaaaatgaccggtaggcagtccgccgtgagtaccgttagcaaaataccgggttgggtggtgtataaaccgtcggtttcaccgcaggcttgcttgggttcgcgaacatcgacaattcgcgtaccatgtacctgttttttctccggcatggtggcacgaaatggctgtaaattctccggcagcaatgcggatttactgccaaagccatgaagaatatgagggacatgggtaaataatctggatacgtcagtcatgtgaatcactttgcctcggtggctgcggagtagcccagtgtaggccgaattttgattagttggctactgttggctgctttaataacctgaatgacgttcccatttgcgctttgttgcaaaataagacgccttgtatcactgtttccaccctgtaacggccaaggttcaggtttaatgatcgaccagagcggataatgcctacagggaaaccgaatgatttctaaagtaaataatgacgctaacaattttgtccgttggcgttttagtctgctgtgcggttgtatcctgctgtcactcctaggattgcttgggcgggtggcctggctacaggtggttgaaccggagccgctggtaaaagaagagaatatgcgttcggttcgcgtgatgacgaccccgaatactcgcggcatgattaccgatcgcaacggtcatcctctggcggtgagcgtgccggtggcggcaatttgggccgaccccaaggttttgctggaaaaaggcggcgtcgggaatgatgcccgctggcgggcgttgtcccaaatgctacatatgccattggctgatattgccagccgtatcaatcagaatccggatgggcgttttgtgtatttagcgcgacaggtggagcaggcgtcggctgagtatattcaacggcttaaactgccgggaatcgccctgagagcggagtcgcgccggttctatccctcgggtgctacggtggcgaatctggtcggcttcactaatatcgatgaccaaggcatcgaaggtatcgaaaagagttttaatcagctactgagcggaacggcgggcaatcgggtagtacgcaaagaccgctacggcaacgtggtggaggatatttccgccaccgatagtcatcccggtcaaaatgttcagctcagtattgatgagcgcttacaggccgaagcttcccatgctttaaccaatgcggtgttgtttaataaggcggagtctggatcggcggtgttggtggatgtggacactggcgaagtgctggcgatggccaattacccgacctataaccccaataaccgaaccgatacgccggagggaaatttccgcaatcgggctatcagcgatatttttgaaccgggttcgacggtaaaacctatggtggtgatgacggcattacagcgcaaactagtgaaacccgatagcgtgttagatacgcacccttatattttgagtggtcaccaaattcgtgacgtcggcttttaccccgcgctgtctctcactggcgtgttacaaaaatccagcgacgtcggcgtatcccgcctggcattagcgatgcccgcttcggcactgctaaaaacctatggctcatttgggttgggcaaatctaccgaattgggattaaccggagaaagcagtgggttgatgccgcaccgtcaacgctggagcgatctggatcgcgccactttctcgtttggctacggattgatggtgacgccactgcagttggcgcgggtttacgccacgattggcagttatgggatttatcgccctttgtctatcactaaagtcgatccgccggtgttagggcagcgagtcctgcctgcggaacaggttcaagaagtagagcatatgatggaaagcgtggcgctgcccggcggcggcggggtgaaagcagcggtacgcggttatcgggtggcagttaaaaccggtaccgctaagaaaattggccccaacggacaatatattgataaatatgtggcttataccgctggcgtggctcccgccagccagccgcgttttgctctggtggtggtgattaataacccgcaagggggaaaatattacggtggagcagtggcggccccggtattcagcgaaattatggggcaaattttgcgaaccaagaatgtggagccagatgccgttcttggctcgcctcagcgccatagctgagaatagtgtcggacaaggctgccccggcttgcaaccacggaggcggttctttagactagcgccgccttgcgcgttctcgcattttccctgctatctggaaatataaccatgtcttatcaatgtcctctttgccatcagccgttacagcttaatcagaagcagtggcgctgcgaaaataatcaccagttcgattgtgccaaagagggctatgtcaatttgctgcccgttcagcataaaggctccaggcagccgggagacagcccggagatgatgcaggcgcggcgcgcatttcttgatgccggttactatcagccactgcaacggcgggttgctgcgctgttggacggcgttttgccgcctgaagccggattattgctagatattggctgtggtgaggggtattacaccgcggctatagctcaacagctgaaacagcggcgagagatgcaggtttatggcttagacgtcgccaaggttgcggtgcgttatggggcaaaacgctaccctgaggtgagtttttgcgtggcatccagccaccgtttgccgtttgccaacggggcactggacggcgttgtgcgtatttatgcgccatgtaaggcggaagaattggcgcgagcggtgaaaccgggcgggtttctggtgacggttgcgccgggcccacgtcatttatatcaattgaaagaaatgatctatcagcaagtgcagctgcatggtgagaacgacgaacatttggaaggatttgatttggttagccatgagtcattagcctacccaatggcgttgccgggatcgcaggctgtcaatttattgcaaatgacgccttttgcctggcgagcgtcagttgaaaccggtcagcagttggccgagatggaaacttttgcctgcgaaacagattttgttattcgtgtgcatcagcggcatatcgataaaactgaatgtagtgcagattaatgtcggtttctattttatatagccagatcattatggcttaaataatatttagataaagaattatgagcgtcagggaaaataggcgaacctgacgctctataacattcaatgatgtaataaacagcgaaatagcgataattaagtcaaatcattagtgataactaggggtgaccgttttatagtattggtaatgatttagatattatcaataaaccaatcagatcgcgggccggggaaagtgtcggcctaatgatgggtcaatgagcaactggattggttctttcactgtcattttattaactctttaaatttaaaacgtattatctctatttttgtgagttaagatccaggttacgccatgtgcgtccgccagactcggtcaccagaatcgatggtacgaagcgcacttgctctgccactttcaaggctaagtcggcaacttcctgcttattcaacgatccgctgccgtaattatattcgccgtccggtaatttataaactttgtcccgacctattaatcgggtaaaaccggcttcgtccattttttcattaagcgtctggtaatcgctttcttcggcattatgcaatttaacactcacggtaaagtaaggcatagaaatccatttatttagtgcgggataatatgctgtatatcatgatgggcggctttttattatgaccgagatcgaattgctgagaattaagcaggatgcgttaaggtaggtggcggttatttgtacgaatcattacggcaagcaggataataatgaagagaaaagaagagaaaagaagggaagaaaagagaaaggaagaaaagagaaaggaagggaagagaggaacagtgccagtgctctgagaagttaaagaccaatcacccatcggttacgaccaccgtgtttagccgagtagcaggcaatatctgcctgacgcaacgcctgaaccgtggattcggtttgttgggttagattgatattatcgtaagtaaaaaacaggaaatttggcttaagggatgttttttaagataaaacgcattctaactgcgtttgtgggctataaactcgaatcgttaatagcgccatatgcagaggcgattaatcttagtgatgtgattgcgttgagtggttacatttatattgtggtgaacggtgcgcgaaacgaatcagcgtctgttcaatttcttatctaaattattgacgcgctgtaatgggcaggtagagcaaatttccaatccattcaaacgatagcgtaaacagcaaagtcggcgctcaattcttatattgccacttttctccgtgacctgacgaacaggctgaaacagcttgtttttgctgccgtcggacagggtacgtaaagcgagaaaatgctcggcaatttgcgtatttgcctgctgttcctgcgccatttttattccctgatacagacgaatccccgcgttattccaaaacaggctttcgcccatacccgccagttggctcagagtaccgcaaaccggtgtcagatgatcttgcaccaactgctgaaaacgacgttcagggtcttgttgggttacttgatgacccgaatgggaaagaataaagctttcaaccacgccggcttcattgagcgtcaggccgatatgctccggtaaaatgggcaactgccagttgaactgcaaattaatccgcatccacggccccaacaggcgggcaaagtaccattgcgaccattttgataccaaagctgcgcgatcttcattcgaatgaagattcagcaggggcgagatcaaggtgagtgcgcgttcaggcgtatataaagcaccggcagaaaaagtctcgcgttgtctcgaggctgcagacggaaagtactgttcaatggcttcctgtcgggcgaggctgagattttctgcggttagcgccataataatcctatttaaaaaccttattcaaatcaggctttggggcatcggctgacgagttcaggcaagcataataggggataagaatcataatgagaatcgtttttatatccagagtgagatttcccgcttccggtggttgcaaggggtcgcattgctgtcgtttggcacattttcctatggttcaacgccacgacatctgaatctcaaccacattattgcattgcgtgggaatgccttcgttcgaacgattttggcgctggacgcaatagcgtgagcggtggcagacaagctggattacgggcaattttttcgggtgctccgcgctttatctatctgttacgtaaacaaatctcgtaaaagcattcaaattaatgaacataaacgcttgcaaagtgtcacgtcggcggcataattcgtgaattcttataataagcattcgcatttagttattaacatttaggcatcaacctttaaatattcgcattagcgataacatcgcaaactttcagggaacaccaaataatgaaaagcacagcaataatccggggcggtaaaaatcgtttagcgccgcgccttttgtttgtcatgatcggcgcagccttgggcacgctatctgcgccgctaatggcagccgatgaaacagcggtagcaaccaaagacgccgctaagccagctgcggcaaaaggtggcgatactattaccgtcgttggcacgcaggaaactttccgcgcgggcggtaacgatctgattccgacctatctggacggtcaggtggcgaacggtggccgcattggtttcctcggccagcaggatgctcgtaacgttccatttaacgttatcggttacacctctaagctggtggaagatcaacaggcacatacaatagctgaggtcgtgaaaaatgatgcctcggtacaaaatgtacgcggtttcggtaatgcctcacaaaactatcggattcgtggttttaatctggatggtgatgatatttcattcggcggcctgttcggcgtattgccgcgtcaggttgttgacaccagcatgatcgaacgcgttgaagtattcaaaggcccaaacgtttttgtgaacggtatttcgccgagcggtagcggcgttggcgggatgattaaccttgaacctaaacgcgccggtgatacgccattgactcgcgttagtctggattatacttcctcatccaaagtgggcggggcgctggatgtggggcgtcgctttggtgacaatgatcagtttggcgtgcgtgtgaatatgctgcatcgcgaaggggagacggcaatccatgaccagaaagagcgtaccaccgcactttctaccggcttggattatcgtggcgatcgcgcccgtacttccatcgatgtgggttatcagaaacaaaccgtacacggcatgcgtaccgatgttgcggtaggcgccgcgaccgttattcctgaaccgccggcggcgactttgaattatggtcagcagtgggtttataccgacatggcgaccacctttggtatgctgcgcagtgaatatgacctaagtcataactggaccgtctatggttctgttggtgccagtcgtaacgaagaaaccggccagtatggctcacctacactgacggataacaacggcaacgcgactattagccgcctgtacgtgccttatacctcggattctattgccgcgttaggcggggttcgcggtcatttcgatactggtttggtcacgcataaagtgaatattggttatgcggccaactatcgtaaagcgatgtccgcctggaatatgtccgacccggtagagaccaatatctataatccgggcgtgattccattcccgccggcaacttcaggtagtgccaatcaggatccaacgcttaacagtcaggttcgcgccagcagcatttccgtgtctgataccttatcggcactggatgataaagtgcagctgatgctggggctgcgtcgccaggaattggtgattcgtaactttagtaacggtgtgccggacagcgtcaattcacaagatgcgatgaaagtgaccccaatctacggcgtgttggttaagccgtgggaaaacgtatctctgtatgcaaaccacattgaagcgttgtctccggggaaagttgcgccctggtatacggcaaacgcaggtaatgtaaccggcattgttcactctaaacaaaatgaagtgggcgtgaaatttgataacaaacgctatggaggtacgttagcgctgtttgaaattaccaagccggcaggttctatcgatcctgtcaccaatacatacgctctcggcggcgaacaacgtaaccgtggtattgagctgaatgtgttcggtgaacccgtatttggcactcgcctgttaggtagcgcggtctggttagatcctattctgactcaagcgcaggatagtaagaataacggtaactacgcggttggcgttgctcgctatcaattggtgttcggcggcgaatatgatattcagtcggttgaggggttaacggcgacaggcaccgtgactcgttccggctctcagtatgcgaatgatgccaataccttgaaaatcaaaccgtggactcgtctggatctgggtatgcgttataccatgccgttaaaagataccaatctaatctggcgtgccaacctaatgaacgtgactaacgaacgttattgggaatctgtagaagatacgggtacttatatttatcaaggcaatccgcgcgagctgaaactgtctgtctcgatggatttctaattagcttaggctaattaaactctctgtcactgtcccgccgttgggttgctaacagcgggatttttttaatcgataatagctcgtttaccgatattctgcgccaaacgcagcagataaccgtccgcatcttgcactaaacattgtcgctgggcgatttcgatttcattggcacgataccaaacgtcggcacagggctgaaacaccgggcagttgacctgctgcaggcgcgtcagaatcggggcgacctcagtcacttcaatctggaaagtcacgccattacccaatgtcttaccgaaaggtgccgtcagccaatgatcatcatctccctgatactgctccagcataatttgcgcaccttcgcgaaccagatagataaagccttgttctggtcggtcgtatctgatgctgaaaccaattatttcacaccaaaaataaatgcttttcttgatgtcgcgcaccactatttcgggagccaacgtcgcccaattttccattttctgttgttacctcagtgaatagcgggaacagacagaataggggagagagggccattcgccaatacaaggaggggaaagttgtgttgtgagtaggatgaatcgtgaggaagagagtgttcaggcagccgatcagggaataactaaccggctgcggaggagctaggccatgttatacaggtgctcgtatagaatattaaagccgatgccgataagaataacgccaccgataatttcggctctcttgcctaacagtgggccaatatagcggccaatcagcataccgagcgttgccattatcatggtggccataccgatagccatggcggtatgcaggatattgacctgtaagaatgccagacctacaccgatggccattgcgtccaggctggtggcaatggcggtcatcaccaaaacccaaaagccgtgacgcctaacctgcgcttcgtccgcagaaggccctttacagccttcgacaatcattcggcaacctaagataaacagcaggctaaaggctacccagtgatcccactccataatgtattggctggcaaataagccgatgctccagccgattaatggcgtaatagcttcaatcacgccgaaaattaatccggtgcgaacggcttcacgaaaacggggtttatacagagtggcacctttgccaattgaggccgcgaatgcgtccattgacatgccaaaagccagaataagggttgctgatagattcatggtaaatagtctcggccgggtggctccatatacacgcaacccacccccaacctacgacggagttacgtgtctatggtctcgccaaccttacctggctgcccgcaccacgtttcgatgaatgaaacgagtatgttgatacgggcgtttctgaaaagcgatgtaatgcaggattacatgcgtcagaaaccggctactccccaatgaacggcgcaaccttatcatattattttgacatcggacaactataaaaaaataatagcgatcgagttgataatgatatttattcttgttatcaacttcagcgctaaatcagatgatataagcagcaataataatgtggacttaaagcggaaatatatttttgttgttggcaaattaagcattctgcggaaattttaatctgccattaggttcgaggaaatattttcaaccttgattttcaaggaaaaagttataaattttttctaggtcatccaaatgtgtcacttgaatcagtaacctacgcttttctaactcgataactagaatgccatcttcagataaattcatagtctttatccggttatattctataaaagcgttagcgtagaagaatccggtgggtttaaacaataatttaggccaacggatataagatatatacagagcgactaaagccaaaccaaacaataaataagtggtgagtggggcgccgtcggacatcacattattataaataagaatggcaattaacccgacaaagatcaggcagtcgagtttatttttacgttttaggcggatggccaataacgtttttcccttcaacgtcttcatgatgaattcgtcgtaaatagcgtagataagcaatagggtaataaagacaaccaagacaatatcggtaaccgacatgcgtttactcctgaaaaaacaaccgggggctagcccccggtttgatacagatatacagacagtgcgcggaaattacggtgccaggaaaccaatccagtagccgaagataccgatggcgaagaagcccataataatccacagggcgttaactttacggcgtaacagccacatacagccgaaggttaacagtagcggtaccagccccggcatcaactgatccagaatggtttgtaccgtcgtgatagtggtttcaccggcctggttggtaatacgggataccaccaccggaatatcaacgtgcgtccacttgttaaccaaggcccccataacaaacaggccgagaattgacgccccctcggtcagtttttgcaggaagccgccgcccatatcgttaacgatattgacccctttcttataaccgtaggccacgccgtaataacgggttagcaggcgaaccaggttaaacagcacgaagaacaggatcggcccgagcaaactgccgctcaaggcgataccggcccccagcgccgcgaataccggacgtacggtgccccagaagatcgggtcacccacaccggccagaggccccattaaaccgactttgataccgttaatcgctgcatcgtcaatcggtgcgccgttagcccgttgttcttccattgccatggtaacgcccagtaccggcgcggccacgtaagggtgggtgttgaagaactccaaatggcgtttaattgcctgcttgcgctcatcgttattctctggatacagacgacggatcaccggcaccatagagaagcagaagcccagcgcctgcatacgttcgaagttccatgacccttggaaaaggttagagcgtaaaaacacaccgcgaatgtcgctggccgtgagtttcttttcaccagtagttgttgtatcaaccatttctctcaccttcgcttagtctaattcgttatcgagatcgttattggcaggagccggaccagactgcacaacctgagatttgttgtatttcgggctgagctgaatgtagagaacggccatgacgacaccaatcacacccaaagcaacaaggttgaagttggtgaaggctgcggtaacgaaacctaaatagaagaacggcatcaagtagccagcacgcatcatgttgataaccatggcgtaaccgaccacgacgatcataccccctgcgatattcagaccgttggtaacgacttctgggatagagttaagcagtgactgaacttccgatgtcccgacggaaagggcaacgatcagtgcaggaatagcaatacgcatggcctgtaagaacagggcagagacgtgtagccaggtaatggctcgcagactaccgcgctccgccgcactgtctgccgcgtgctggaaagccacggtaacggtacgaacgatgatggtcagcacttgaccggcggcggccagcgggatcgccagtgcaataccggccccgatgctttgaccaccggcgataaccagaatggtagaaatgatggatgccagagcagcatcaggggcaacggcggcgccgatgttcatccagcccagagcgatcatttccaacgtaccaccgatgataataccggttttcatatcacctaaaacgataccgattaaggtacaggcgacgaggggacggtgaaattggaactcatccagaatggaacccatcccggcgatacaggcaacgataaatatcagcacaatctgaagagttgtgatctccattgtacttctcctatgactaaaaaaagctgagtaaaataaccctgttcaaacagaaccggacataacctttctgtgtagttatttatagagctaattagttaagttttgcgatcagatccatcatttttaagcgactatccgaagacacttttcgtacttccagttcgatcccgcgttcatttaatttcttaaatgcttcgacatctttctcatcaacggaaaccgcgttgttgacctgggttttaccctgacggaacgccataccaccaatgttgactgatttaatatccacgccgccttctaccaggcgcaggacgtcgtttggattggtgaataacagcatgacccgatctttggcatatttagggttgttgtatacgcgaatggctttttccacatcgacgacgtgggccgttacgccgggaggagcaacctgagtcagtagggtcttacgcatatggtcggcagcaacttcatcactgacaacaataatacgattgacgttggtttctttggtccagcgagtagcgacctggccgtgaatcagacggtcatcgatacgcgccaaaccgatcttcatatggtcatcgggacccaaaggtgcagcgggcgcggacggcgctttggctgcgggagctggttgctgcgtctcgggcttatcactcgtatctggcgtttttaaggcttttacaccagtgcgaccggtttccaccgcgatactgaccagttcggcgaaggatggattatcatcacgcgccataaaggtttctaccagcatcggaatgttaaccccggtgacgacctcatagttttctttatcaacaacgatacggctggcggcattaaagggactgcctccccaggtatcgaccaggaacaagacacctttcgtggtatccagacctgccaatttccctgtgtacttctcaataagcgtttcggcattttcaccgggtacgaaatcgatatacgcgacgttttcttgctcgcctaggatcatttccgcagtacgcagtagctgttcagccgctgccccgtgtgtgccgatgataatagctatactcactcgctaccccctcagttaactcaagattgagttctggcacgtcatgaaagttggtttactaccagcgcgtccctgcggtacatattgaatctattatgatagtcgtaatcactacgacccgccgacgatttgtcctttatccccatgaatcgattcaggtcatgggcacaatgccgctggctggtatttattttagtcagtgaaaaaataatttatgtgacgttgctcatttattgggacatgttatgaatagatttagtctggttggataattaaacagcactgatgtgacaaagagtgttggaaggttaataattcccgctatgacattaaaaagattcctgataaagttaagttcatttttatttgtaaggagttaagggcctcagctctccctatggactgtcaccgaagttactgctttgaagaaggttatcccccgcctgcgggtaaaaatcaggttattcgatcgcgtatttatctatcgctcatcttcgtacaatctttcactgaattccgacgtgtaatcggtttgcggcgttttgtcgtgcctgttaaatcacgtctgtcccgtcagtcatgttctaatttttggagtcttgcatggaatttctaatggacccctcgatttgggcagggttacttacgctggtcgtgttggaaattgtactgggtatcgataacttggtgtttatcgccattctggccgacaaactgccgcctaaacagcgagacaaggcccgaattatcggcctggcgctggcgctgattatgcgtttgggactgctgtcggtgatttcatggatggttaccctcaccaccccgttgtttagcgtcgccagtttcagtttctccggacgggatttaatcctgttggtcggcgggctgttcctgttgtttaaagccaccactgagctacacgaacggctggaaggtaatcagcatgatggcaatgctaaccgaggctacgccagtttttgggcggtagtcgcgcaaattgtggtgctggatgcggtgttctcgctcgatgcggtgattaccgccgtcggcatggtgaacgatttaccggtcatgatgaccgcagtgatcattgcgatgggcgtcatgttgctggcctctaaagcgttaactaacttcgttaacgcccatcctacggtggtggtgctgtgccttagcttcctgttaatgatcggcttaagtctgatcgcggaaggtttcggtttccatattccgaaaggttatctgtacgcggccattggtttctctatcctgattgagctgtttaaccagattgcgcgccgtaactttatcaaaaatgaatcccggttgccgcgacgccagcgtaccgccgaggcgattattcgcttgatgggcggacgtaatcaggagcaagagcagggcaatgcgcctcaaaatgcgcccgttgaagcttttgcggaagaagagcgctatatgattagcggtgtgctgacgctggcttcccgctcattgcgcagcattatgacgccgcgcaccgaaatcagctgggttgattgccatcgctccaaagatgagattcggatgcagttgttggatacgccgcatagcttgttcccggtgtgccgtgactcgctggatcagattatcggcgtggtgcgagctaaagatctgctggtggccattgagcaaggccagtctatctgcgaatttgcggcggcaacgccacccatcgtggtgccagataccatggatgtcatcaatctgttggcggtgttgcgtaaagccaaagggcgtctggtggtagtcaatgatgaattcggtgtggttcaggggctggtaacgccgctggacgtgctggaagctatcgccggtgaattccctgacgaagatgaaaccccggatatcatcaccgacggggatggctggctggtgaagggcggtgcagatttgcactcgctggagcaagcgctgaactgtcaggaactggttagcccgacggaggactacgcatcgctggcggggatgttactttctcactccggccacatgccatctgccggagatgtgattgaactgcatcaactgcgtttccaaatcattgacgtgaccgattaccgtattgaattagttcgtatcgataaaatcgaaccttcagacgacgaataagcgcagattttcggttaaccagttataccctaagggagccaatcggctcccttttaacaatccagcctcctcctgctatctcggcttctgagggggcaatgcactgacgtcagccgtatttcttagcgcgcgaataatgcgctgaccattgaaacgctaaattagacggcgaaataacgctgcgataaaccggatgctgtttaaacggacgagactttcatggagagaaatatacgagtttacgtgagttgatagaccaagaaatgtgtctgatctccggcggtaatatgggcagcgggaatttacaggccgcagcgagtgtgaataccaatcattcagtgaattaatttctgctggagtggaccctctatcgatatgaatgaaacaataaatatcctccggcatagccggaggtttttcatatgcgcctataaggctctgttgccagccgcgccctaacaggcgcatcgcgatctgacatttgcatttatggattacttacggcccgtaaacgggctgcccggataggggatcgagagttgctctcccattttatcctcttccaactggtgctttatgtattcttgtatcctggctgtatttttcccaaccgtatcaacgtaataccctcgacaccagcactccctgttacggtatttgaacttcaaatcgccaaactgcttataaagcatcaggctgctctttcctttcaggtatcccataaaacccgacacactcattttgggcgggattaccagaagcatatggatgtgatccacacagcattctgcttccagaatattcacgtttttccattcgcacagcttttttaagatactgcctatcgctttgcgcttttccccgtagaacacctttcttcggtacttcggcgcaaaaaccatgtgatatttacagctccatcgcgtgtgcgctaagctcttttcgtccctcatagggacccccttttgatttcttgttgaacatttgcagttgccagaccgcaaactgttttaacaaatcaaaaggggtttttataactggctcaaagctgaaagctttaccgaacctccagcctagctggaggttttctgtgcacaataaaacgggagccgattgggctcccgtttgctgatttatttttgccggtttagcaaaaggcatcagtgagttgcattgtatatttagttacactgcactttgatcgccagaccgccgcgagaagtttcacggtatttagcattcatatctttaccggtttcaaacatggtttcgataaccttgtcgagagaaacgcgcggttcgctgctacggcgcattgccatgcgtgcggagttaatcgcttttaccgaagcaatcgcgtttcgttcgatgcaaggaacctgtacctgaccggcaaccgggtcacaggtcagacccaggttgtgctccataccgatttcggccgcaatgcatacttgaatcgggctagcgcccagcagctccgctaaaccggccgccgccatagaacaggctacgcccacttcaccctgacagcccacttctgcaccggaaatcgacgcattcattttatacagaatgccgatagcgccggaggcgaggaagtaacggataaagatttccggtgtcacaggctcgataaagtgatcgtagtaagccagaaccgctggaacgataccgcaggcgccgttggttggtgcagtcaccacgcgtccaccggcggcgttttcttcgttcacggccagcgcaaacatattcacccagtcaatcacgttcattggatcgctggaaagtttatcggaagaaaccaacagacggcgtagcgcagaagcgcgacgcggaacgcgtagcggacccgggagaaccccttcggtattcagaccacgatcgatacaggcgcgcatagtgtcccaaatcgccgtaaagtaagcatcaatctcttctttactgtgcatggccagctcgttctgcatcaccataccggagatggacatcccggtggtgcgacagtgggccagaatgtcttcagcggagttaaacggataaggtacgctaatctcgttgactgaggctttaccgaaatgttcttcatcgacgatgaagccgccgccgatagaatagtaagttttgctgtacactttttcatcgccagcgaaggcgtgaatttgcataccgttttcatgcaggggcaggttatcgctacggaaaaccatgccgccttcacgcgggaaatcaacttcgtgcaagccattggccagcatcagtttttcacgttgctcaacatcgcgaataaaaccgggaatgctatcgatatctacggtgtcaggcatattgcccgctaaccccataatgatagcgatatcagtatggtggcctttaccggttaatgacagtgagccgtaaacctccacggccacacgcgtgatagaaggcattagtccctgtgttaccaggtcgtctacaaactgtttgccggctttcatcggtccaaccgtatgagagctggacgggccgatgccgatcttaaacatgtcgaaaacgctaatcacgctagaactcctcaaaaggcattgtgtttaaagccgatgttttatggtcgaagcgtttaaaaattacgcaacgggaacatcggtattgtaggttgactcgtcaattttcgtgactttattcgcatgaaataaagtaatcgcgagccttagtttattttgtttttactggtgttagcggtatcgatcggatacagcaacggtcactctgttaaccaacaacataagtgactttttttacgggttattaaccccacactattagtggtttatagtgaaggaagctattttacaggtatttcataacgctgacaggcctgtttacagtttttttaaaaactgcgatacagagaacatagagtaaaagtggtaaaagtgaggtgatagggatcgttttatgctgaaaatgagggggttagcgcgtgatgatgtgatggttatcacgcgtttcagcgcggttcgatgctgacctgctgagccagacggcgaataatggcggcggtgagtccccagacaaattgactttcgtaccaggaaaggtaaatccggtggtgcgcgcccgcgcgatgaacatccagtggataataacgtgaaaggcttaacgcttcgtatagcggcatttcgaatagaccggcaacctcctcttcattaccgtgaaaggggacgtccgcaggaataagacccacaattggcgtgacctgaaaacccgtcgagctatccagtggccctagctgacccagcacgcgtaccgattcaggaggaatcgctacttcttcctgcgcttcccgcagagcggtttcaatcagcgaatgatcttctggatcggccttgccgccagggaaagccacttgtccggcgtgtttacgtaaatgagcggagcgacgagttaacagcagcgtcggctctgggcgacaaataatcggcaccagcaccgccgcgcgatgatgatgagccgacaggctgccgggctggggcaactgaagctgaaaacgactgataaattcggctaaactgatcccactcacggctgcgggttctcccccaataatggcaaaatgcgcgcgattttatcaaaagtttcttgatattcggcttgctcctgactgtctgccactatgccacctcccgcccaacaatagattttacccttttccgtcaataaggtacggatggtgatattggtatccatggtgccacagcaactaatatagccaatgtttccgcaatatccattacgacgatgaggctccagttgttcaataatctgcatggcacggattttgggcgcgccggtaatcgaaccgccggggaaacaggcacgcagcaattgtgttggcgaacaattcgtcggcagggtggcggtgatggtactcaccagatgatgcaccgcagggaaaggttccaccacgaacagctccggtacccgaacgctgccaggttcagcgacgcggccaatatcgttacgcagtaaatccacaatcatcaggttttctgctcgatctttgggtgacgcggctaagcgctcagcctgctgccgatcggcatccgcatctttcagtcgtggcaaagtgcctttgattggccgagtctgtatctgttgattttctagccagacaaaacgctcgggggaaacgctgatcaccgtatgttcaggcaggcgaataaatgcggagaaaggcgcgcgattgctggcgctcaggcgtaaaaaagcctgccattcatccccctgatattcggcgctgaagcgttgcgccagattgatttgatagcagtcgccactgtgcagatattcctgtacctgacgaaatttttcgccgtactcttcacgagccatattggcctgccaagggctttgcagctcgaaagactggggcgtagccgggcgctgctgctcgagccattgatggcgttgctctatatccccgtggctaattagcgtcagtttttgccgttggtgatcggcaatcagcgcccagtcatacaaaccaatggccatatccggcaagtgaatatcttgctgtgccagctccggtaagacctcgattctgcgtcctaaatcgtaaccaaatagccctaatgcgccacccaaaaagggtaggtctggattcggtgagcaggtcaatcccaagcaatccagctgttgctgtaataaatcgaagggatcgatttctgaatattgggtattcagggaatcgctgatttccgtttctttgcctcgggtgatcaaacgcacgcggggttcagcgaccaaaatatcaaacctgttatgggaatgctcggcaaaacccgaatgcagcagcatcgcccaaggcaaagtggaaatcggagcgaaatagcgtaacaacgcatcggggtgataaggcaggcttttacagaaaggagcattggcttgcaggctatgagtatttttttcgactgacgacatgacaactcgtgaaataatttcggggaaaagattcggcctgtaaggttatcacagattatgtgggcgagggcagtagcggcttgacagggaattccctattacgctaaagaaacgggtatacttgccggctaattcgtaggagacagataatgctagcgggaatgccctcactttctcaccaagagcaacaggaagctgttgaacgtattcaccaactgatgtccgaagggatgagcagtggtgaagccataggtctggttgcggaagaaattcgcgagcgccacaaaaacgatcctcaggcaatggtcatctttgatgatgaagactttgaggaacacagcgatcctgaatatcgccgcgacaatgaaaaagacgcggacgagtatgaggatgactacgaaggttagtgataactatcagtgaccagaagctaagttatccgaaggctagctagccaaagtcaatcgccatcatgaaggtttcggtaaactagcctgcaaccttcatgatgtttcgtatcacttcctagagccttggatttttagctgtggctgaccgtgatttgcccagcggcatttttcgccacggccacggcttgttctaccgtttcggctacggccagcgcgacgcccatccgccgtctgccggcaatttcgggtttaccaaacaaacgcacgtccacgtcacccagcagcgcatttcccaaaccgcgatataccacattctggctggttaactcaggtaaaataaccgccgaggcggcggggccatactggcgaatctggctgattggcatgccgaggaaggcgcgaacatgcagcgcaaattcggaaagattttgtgaaatcagcgtgaccataccggtatcgtgtgggcgaggggagacttcgctgaaaataacttcatcaccgcagataaacagctccacgccgaataaaccgtagccacccaaagtttgaaccactttagccgcgatcgcctgagcgcgttgcaacgccagttcgctcatctgctgcggctgccaggattcgcgataatcaccctcctcctgacggtggccaatcggcgcgcagaaatggataccatctacggcgctgatggtcagtagggtaatctcgaagtcaaaattaaccagaccttccacaatcacccgaccgccgccggcgcgaccgccttgctgtgcataattccatgcggtttgtcgttgctcttcactgcggatcaggctttgccctttgccagaggaactcatcactggtttcacaatgcacggataaccgatttcggccacggcttgacggaagcggctttcggtatcggcaaaacggtagctggaagtgggtaatcccagcgtttctgcggccagacgacgaatgccttcacggttcattgtcaggcgagtggcttcggcgcagggcactacgtgttgacccataagctccagctccaccagcatatcggtggcaatggcttcaatttccggcacgatgtagtgggggttttccagctccacaattcgtttgagcgccgccccatccagcatattaatcacgtgactgcggtgggcgacgtgcatagcaggggcatcggcatagcgatcgacggcgatcacttccagcccaaggcgctgacattcaatcgccacttctttgcccagttcgccagagccaagcagcatcacacgggttgcgccggggcgcaaagcagttccaatggttaacataattcgatacctacatcagcaagataatatgcgaggaagaaaccgccgcagtatatacgaaaacgattgcgcgggcagcgcttagggcaaaaaacaggtttgagtgcggataaattcagcaaagtaaggtctggagcaatcaggggggcgaagatatcgaaagggatgcatttgacccatatctagggttacaggagaaaaacgcagatttccccgcgcttttttacgctttaactcaagaaaaggcctcaactctgctattatcgccgcaaatattgcgcttgccttcaggcatcgctttcaatccattccgttatataagagttaccgccgtgagcacaacgtccttttcttccctaacgctgcctgccgagcagttgtcgaaccttaatgaactcggttataccgaaatgacgccggtacaggccgccgcgttaccggccattctgaacgggcaagatgttcgggccaaagccaaaacgggcagtggtaaaacggccgcattcggcattggtttgctggataaaattgccgtgggtgagtttgtgactcaggcattggtactctgtccaactcgcgaactggccgatcaggtcagtaaagaactgcgtcgtttggctcgttttactcaaaatattaaaattctgaccctatgtggcggccagccaatggggcaccagttggactctctggttcatgcgccgcatattgttgtgggcacgccgggacgcattcaggaacatttgcgtaaacgcaccttggtattggacgatctgaaagtgctggtgctggatgaagcggatcgcatgctggacatgggctttactgacgcgatcaatgacgttatcagctacacgccgccgcagcgccagacgcttctgttttccgctacttatccggcggggatcgaacagatcagcgcaaaagtacagcgtgagccgctgaacgtagaagtggccgatgaaggcgatgaaccggcgatcgaacaggtattcttcgaaacgactcgtgaaaaacgtctgccgctgctgatctcagtgttaagccactatcaaccggcgtcctgcgtagtattctgcaacacgaaaaaagactgtcagagcgtttacgatgcgctggaatcacgtggaatcagcgtattagcgctgcacggtgacttagagcagcgggatcgtgatcaggtgctggtgcgcttctctaaccgtagttgtcgagtgttggttgccaccgacgtcgcggcgcgcggtctggatatcaaagatttggaactggttgtgaacttcgaactggctttcgatccggaagtccatgtacaccgcattggtcgtaccgggcgtgcgggcatgagcggacgggcagtcagtctgtgtacgccgtcagaaatggggcgtgcgcacgcgattgaagattatctgcaaatcaaagtgaaatggacgccggcggagcaagtgagccgcagcgccaatgtcatgctggagccagaaatggtgacgttatgcatcgacggtggccgtaaagccaagattcgcccaggcgatattttgggggcgttgaccggcgatgcgggtttgacggcggctgacgtcggtaaaatcgatatgttcccagttcatgcttacgttgctattcgcaaagccagtgcgaaacgggctatacaacaattgcagcaaggtaaaattaaaggcaaaaactgcaaggcacgtttgttaaaatagtaaataacgatttttacggggtagcgtgtattgcgttgctccgtttcagccccttatattgaatgttaataactgacggatttactgtttaagttattgaatttatatatttatttcgtttgtttgagctggccggaatcattccttccgctcaacggaatgactatttaaccgcatttaataaagggaatgtattaaatatgatacctgtcattaatcagaccgcagtatttttccgcccagcttctctttcttcttcctcggttaaccctaatgattttgcacccccaacaggtgagataaagtccgcgctggatcagcatattaagggaaagcaggtgctggtttttagcggcttttccggcatggggtacgacgatgttgaagcgtttcaaacctcacttgaatctacattaaaagaggccagcctcaaccacggaaaacataatgtagtggtggtcgcgggggcgaccagcgtaggtattggagcggtttattcgctagcaaaaaaactcgaaattaaaacgctggggattgtttctgaacaagccaaaggcggcggtgaaatagccagtagttgtgacgatgtaatttatgttcctgataaaaaaggcagttggcaggtgctctactatatagataaggcgaagggattaacgggttcatatatgacttatgtcgcctcaaaagcatcgccagcttcaggtggtgagttcttcgcttttgggggcggagacgtgacggtgagtgaacttaaggaagcgaaaaaactgggaataaccacgcgagtttatcctgatttccaacccaatcgggataaagtaaaagagcgccaggccaataaaccgggtagcgatatgacgcccgtgaaaacttatatgactcagtttttggaataaagcctgaccacatttttcggtagcggatgccaatccgggtttgagatccgtatttacgaaaatcgtgttcgctaaatgagtgttcatcaatttgccgttgaatgacttcgaataatgggaagcgctgagccgcaacgagagcttcccattatgttataatttctccggattaaatatttcctgcttatgtatccgccacttatcgttttcagaaatccctattattggaagggatttcgttctttcattttgaggtgaataacgcagcagggaatgattaccatcatgtctgagtgtctcttcggggcgtcgcggatattaataaagttacgggttggtaaaaggactctaataaatggccgttgaagtaaaattcgttgtagtacgacagggtgaggaaaaaatgactttcacaaccaaaaaagaagccgatgcatacgataaaatgttggatttggccgataatctggccgaatggttgtcgcagtcccctctgacgatggaagaagaacagcgtgaagcgctgagtttctatctggctgaaaataaagatgttttatggcagattttacgtggcgctgctccaaccgcagcggcggagcctgtggtgaaaaccaaggcagagaaaggcgctgccaataagaaaaatgacaaaaccgaagaaattcaagcggcttaatgagttatctcccggcaaaatggggaaaaaggatctagaatgaatcgtgaaatcaccttcttcagccgttttgaggcggatattctggcgaatcgtaaaaccattactattcgtgatagcagtgaatccgattttcaacccggtgaagttttgcgggtttgccgcaatgaggatggcgtatttttttgccacattgaagtgaagtcagtgacgccagtgacattggacgcattaactgaacgccatgcgaagcaggaaaacatgtcattggatgaactgaaaaaggtgataaaggagatctatcccggtttgcagcaattttatgtgatcgaatttacccagtgctagttctgtaatggaattcactctgtaacctacaacgcgatcttttgctgcacctccggatagaaataataacgattggaggagcaatgaaaaaaacggcattcactttgactgcgatgatgatggcgctgggtagcatggctgcatcggctcaaaaccacgagcaggagcaacgcactgcgaagttccccgcctgcgtgggattgactcaggccaaggtggcgactcaggtgaaacgtgactttttgcaaaatcgcattgtccgttgggagtctgataaaaagctgctgggaaccgcaacgccggtggcctgggtgagtccagatgatatcaatgggaaagacgatatctgggaagtgccgctgacggtgcgcgggaccaaagcgaataaaagctacgacgtggttctgaactgcgttgaagggacgataacctacagtttgccgcagtaacaggttaaatttagacaggttttagtcgctcaggctattttgaatgacagtgtccgagtgccgctttctgactgaaatcccgattcgcaggaacggcattcggcgctgattatagtttctccgaattattcaacgactgtttacgttgcctctcgatacacctcttatttatcatatggttaccacgacatcggatttgccgaaaacgtgcaggtgctcttggcatcgtgcgttaatcgtgtcactctggcaaacatatattgatacggataattcacagatgatcacacctccaaaggcggccaagcgccctcataccatgactttgcacggcgatactcgtgtagatgattactattggctccgcgatgatgaacggagcaatcccgaagtattacgctacctgcaggcggaaaatgatttcaccgaagcggtgttacagcctcagcaaccgctgagggaaagcttgtatcaggagatggtagcgaggatccctcaacaggaagcctcggttccttatgtgcgtaatggatatcgttaccaaactcgctatgaaccgggcaatgaatacgctatttacgttcgccaacctaaagaggtcaatgccgaatggcatacgttgctggatggcaatatccgtgctgcagacagcgagttttatactttaggcggtttggacgtgagtccggacaatcagctactggcggttgccgaggattttctgtctcgccgtcagtatgatattcgcgttaaacaaatcagcgacgatcgctggcatgacgaagtcatccgcaatacctcgggtaatttcgagtgggcgaatgattcgcaaaccctgtattacgtgcgtaaacacgaaaagacgctgctgccttatcaggtgtatcgccaccgtatcggcaccgatccagagcaggatgagcttatctatcaggaacaggacgatactttttacgtcagcctggaaaaaaccacctcggagcgttttattctgattcacctcggtagcaccaccacttcggaaatcctgctattggatgccgatgacgctgaggcgatgccgcaaatgtttgctccgcgccgtcaggatcatgaatacggtttggatcattatcagcagcatttctatattcgttcgaataaaaacgggaagaattttgggctgtatcagagccagcaggctgatgaaagccaatggcaaaccctgatcgagccacgagttgaagtgatgctggaaggcttcagcctgttccgtgattggctagtggtggaagaacgtagtcaggggttgacgcatctgcggcaaattcactggcgtagcggcgaagagaaaaccattgccttcgacgatccaacctacaccacctggcttgcctacaatccagagccggataccgcgctgttgcgttacggttattcctccatgaccacgccaagttcgctgtttgaagtcaatatggataccggcgaacgggttttgctgaagcagcaggaagtgaaaaacttcacggcagaacattatcgcagtgaacggatttgggtgagcgcgtcggatggggcaaaagtgcccgtttcgctggtttatcatcgcgatcactttaagccggggactaacccgctcatggtttatgcctacggttcctacgggagcagtatggacccagcgtttagcggcagtcgtctgagcctgttagatcgtggttttgtctacgcattggcgcatattcgcggcggcggcgaactggggcagcaatggtatgaagacggtaagttattcaacaaaatgaatacttttaacgactttattgatgtaaccaaggctttaatcgagcaaggctacggcgacgccgaacgagtgtttgctatgggcggcagcgctggcggcttattgatgggcgcggtgatcaatcaggctcctgaattatttaaaggcgtagtagcgcaggtacctttcgttgatgtggtcacgaccatgctggatgaatctattccgttgacgactggcgaatacgaagagtggggcaatccgaacgataaggcttattacgactatattaaacagtacagcccttacgatcaggtgcgcgctcaggattatcctcatttactggtgacgaccggcctgcacgattcccaggtgcaatactgggaaccggcaaaatgggtcgcgaagctacgggaaatgaaaactgacgaccatcaactgctgctgtttaccgatatggactccggccacggcggtaaatcaggtcgtttcaaagcctacgaggatatcgcactggaatacgcgtttatcctcgcgctggcttaatttacctatgattccagataatgcgttagggtatggcgcatgtctggagtcaggtctttcaccgatttcagcatccaacgcagatagtccggatcttgctgggctatctgttcaatgttttgcccacgatacttgccaaatttcagcgtccgtaacagcaggggggcctgcgtcagctcaaccattttctcagcgctccaaccggagtctttaattatgcgttgcagcagggcggcggtgatatagcagtcatataatgcgcggtggggataaagattttccggtggcgtaacttccagtcgcagggcataacgcagatattgattactgtatttgatatccggatacagtgctcgcgccaatttataggtacaaatccactcaccgcccatttccggcaagacacctcggtcaaacggggcattgtgcgcgacataatattgactgccttgatatcggccaatggctttagcaattcgaggcttaccttccaccatttcttcggtgatatggtgaatggccatagcttcaaggctaattggccggtccgggctgattaaatcactgatcggattaacgattcgcccatcaatcagatccaacgaagcaatttcgacgatcccgccgtctaacccgcaagtctcagtatcaataatgcgaaaattcatgtgttctccagagactggccattattcggttttatctggcgatcataatagactggccagtccctgccaactttcttcagtcaggcgggtaatcaccagagcctcgtgttaccgctaatctgggcgatcgcgttgccttgttgatcccacactgcgcttatgcccgcgccgattttagccgaataaattaagttataggcaataaaaaacccgcctgagcgggttaacttaacgtgatgaaaaacctttactctgcgctggaagaagatgccttcttcgcacgtttctccgcctttttttcggccggagttttcagtggttttttcttcgcgttctttttgctgtccattcccttactcatggtttgcctctctatgaccttcggttaggttggtacgcatcttcattaaggccctaatagcgaatacttgcaaggagataaagtcgataaaaggctaacacgctgttaattataatgattattaaaatgtaatacttgatattaacgaggaatagcgacattaacatcctttgccagtgaaaccgatgtaatgatcggttatggaatctgcagcgcatttcctaatgattgactcatcaacggcgataaaaaatgcgcgatagggatcgtataaccggtatttaaatgattaatcagctttatttgacctctttagtcgttgaccctgcgtcaggcataggcttttatagagaggtgatcaataacaaaaatggaaaatgcgatgggacaattacggggactctatccggcttatgagccttacgattgcggctggttggaaaccggtgatgggcatagcatctattgggagttatgcggtaatccgcagggaaagcccgcagtatttattcacggcggtcccggtggcggcattgcgccatatcatcgccagttattcgatccaaccaagtataaagtgatgctgtttgatcaacgcggctgcgggcaatccagaccacatgccagcctggataacaatactacctggcatctggtggaagacattgagcgtctgcgcgaactggcgggtgtcggtcaatggctggtgttcggcggttcctggggctctacgttggcattggcctatgcgcagaagcatccggagcgggtgagtgagatggtgcttcgggggattttcaccctgcgcagagaagaattgctttggtactatcaggacggcgcatcccgtttcttccccgataaatggcaaagggtattatccattttatctgaagaagagcaaaaggatgtgatcgcggcttatcgcaaacgtctgacatccccggatcgggctgtgcagctggaagctgcgaaattatggagcctgtgggaaggggagacggtaacgttattaccaactaaaagctcggtttcattcggagaggatgattttgccttggcttttgcccgcattgaaaaccattatttcacccataacggttttttggcccatgacaaccagcttctggatgatgttccattaattcgtcatataccgacggttattgttcacggccgttacgatatggcatgtcaggtgaaaaatgcctgggatctggcccatcgttggcctgaggcagagttacatatagtggaaggtgccgggcattcattcgatgagccggggatattgcatcagttgatgttatcaacggacaaatttgccaaataatcgggttcccgcaggctaaacgctggcgggaacctttcagtcgccttacttaattttaggctcataaggcaaacgtgagaatttattcgattcgctccgatagtgcgcgaggcgctgcaaaaagtagtctcgcaggttttccgtctgttcacgggcaaccagttcagggatcactggcatgttatagcgttccttaaatgcaacgcccgatgcagctaaatcgacgttcatttttgccgtttcttcgtcagaaagctctgccaagttgtaacccatcgttttctcctctttcgacttaagcggcggattgtatcaaatcagcgttgaaaataatgcaggcatctccctatggcaagagggtgtggataacggcagagaggaatgtagagaagaaatagcgagccaaataataaatgagaatgattggcgtttattttaaataataaattaaaaataagaatgattccttttattattggcgggcttgttgataatagttatcaaagttatttgcccactttttcccagattaattaaataatttatttcctcatattaaacatgcagttaatacaatttgttgttttaatctttttaaatgtgaatagggtgtttttattttgtgtttatgttggcataatacgtgaaataacctcctgccaacctgcatgataaaaactagggactaattatgttgaagaaagaaatggctcaaaagctcaatgagcaactcaatttagaattctattctgccaatctttatttgcaaatgagtgcatggtgcagcgataaaggttttgaaggtgcggccgctttcttgaaagaacattcgcaggaagagatgcagcatatgcagcgtttgtttgaatacctgagcggcacaggttcgatgccgatattgggcaccatcagtgcgcccccggtagagtttggctcgttagctgatgtcttcaagctgacctatgaacatgagcaattgatcaccaccaagatcaatgaactggcacatgttgccatgactacgcaagattactcgacgttcaacttcctacagtggtacgtttctgaacagcatgaagaagaaaaactgttcaaatccgtattggataaattggctctggtgggtaacagcggtaattctctgttctttatcgataaagatttgaagaacatggccaccagcgcgcaaatccattctcaaggttaattctatcttttgagctataaccgcagtttctctgttatcgacagaggctgcggttttttattttgtgtcatccctgcctgaaaccatttcttgtctgtgcctgtaagctcgacttcatactctcaactcattattattcatggctaacatacggaaacggatgacttcaagtgagcatccggtggcttttcgaccacttatccgatgtcggcagtttattttgtgtggtatctcacatgtagtacatccaactggaagcgatcggggtttacgccgccaatatagggtaaagttggtagcagcgatttttttaccccaatttatttaagggactttatgttaattaacaaagtacgttcatcctgccgcatgctttctgcactggttgttttgtttgttggcctttccagccagcaggctttagctcatgctcatttgaaagtggaaacccctgccgccgataccacggtaagtgccgctccagaagcgttaacacttaatttttccgaagggatcgagttgggtttcagcggtgtgaaggtgacggggccagataataacgcggtgaaaaccggcgctttaaaacttgacccggttaataacactcagttgattttgccgttggataatgcgctaagcgcagggaagtataatgtttcctggcatgtggtgtccgttgatggccacaaaaccaaaggcaattacagcttcactgtaaaataatatgtctttagcggccttatttgtcctgtgtcgctttgtgcattttatggcggtgatgctgatgtttggtgtcagcgtattcaccgccatattgtcatccgaccgtttcgctctaacattacaacaacgccttcaacccttgctggctagcagtacgctagtcgcggcattttctgccgtcggcctgttgtccattcaggctggaattatgggcgatggatgggcagatacctaccagtttcccgtgtgggggttagtgctgggcacgcgtttcggccaggtttggcagtggcatctcgcactgtctttcatcagtatcctgctgttgtttttcaatcgaaaatcatatttttcggctctgatggtcgcctgttcgtcgctgttactggctagcttggcttttatcggtcatgcggcgatgcatgatggcataattggctggatacatcagtcgaatcaaattctgcatcttttcagcgccggttattggttcggtagtcttttacctttgctggtttgcctgccctatacccgcaatagtcagcataaacccgccgctatccatactttaatccgtttttccagttggggtcatttggctgtcgtgctggtggttgtcaccggaatgattaatagtttcattatactgcgtggttggcccctggatttcacctcgacatatcagagattgctttggtgcaaaattgtcttggttgttttgatgattatcattgcggtaatcaataggtatcgcgtggttccagcaattcgtcatttaccggaaaaagcgcactattggctggtgatgaacgcttggtttgaggtggtactaggggcggcggttctacttttggtgagcacctttgctacatttgagccggtataagcggctagagggctaactagcagggaacaaggcttgcttctttagggttagatgcaggaaaatcaggtcaatcagctaacttaggaatagttaacatgaagggtttcgcgctaacgctttctcttttgcttctggctgctaatgctgcggcagcatcaaagattatcacggtcagtaagtttgaatttggcaagcaatgggcattcacgcgtgaagaagtgatgctggagtgccgctcaggtaatgcgctgttcgtgattaatcccagtacactagcgcaatatcctctcaatgaagtagcaactgagcagatgaaatcaggaaaagtattggcttcatcattagatccgttggttttggaagacaaagataatccgggcaaaaaaatgagcctgcaacctttccagcaacgagctcaaactctgtgtgaaaaatagggcgaaagcggatatgcccgccgggatagcgtttgaataatctcataattaccagtggactaactaagaagctattagttaacctgagtgattattaagttattatgtcgaaagttggtaaaacgtgggtcgtctactacgcttaagtagtacggctgaataagcctgcatgaaatgccaacttttagcgcacggctctctcccaagagccatttccctagaccgaatataggaatcgtattcggtctttttttatctgattgtttttattgatgttttttctctccgtccgaaaatgtccgaaatttgtccgaaatcctatactcggcctaaatctcaacccactcatttttacgtgaatccaggtatacattcgtcattttcatcgacttgtgaccaagcaatttctgtgcaaattccttaccgtattctgcttcataaagccgcgatgccaggctgcggatttcatgaaaactgggcggggagacttcataaaccagatcggttgccttcaatgctttaacaaatgctttggtgagcgagtccgcatttaatgcaccgggctctcggcctgattttctactggacgagcaaatgagatattcgctcttattgttattcaggcattgttctacaacgtcaccgacggaggtattcattatttccaaccgaagtgatagtgatatagctatctgcattttagttttactttggactatccaaagcttgccatcatgcacgtcgcttctttttaattgccgcacatcgtcacggcgttgaccggtaatcagcgccagtgccaggctgagttgaacccagttctgttgttggccggcagcctcataaatcttgcaaaaggcttcatagtcgagccgctctcgcttaacttttggtgacggcgtacgggttgcttccacaggattgcggctaattaatccatcagctatggcctctctgaaaacgtctgataaaacagagcgcaaattaaccgccattgaacttttaccattatcgacataggtattaataaaatcagcgatatgcttggtggtaacggtttcaatcggcttatctccaaattcttggttaatatatccgatttgcaggactctcattttcatggtgttatcagccagctcccgacgctttaatagtcctcatgtattggccacctgaatagaggtgatatgctcacctcagaacaatacaggtgcctcaatgaaaaaaagaaattttagctcagagtttaaacgcgaatcagctcaactcgttgttgatcaaaactacaccgttgctgatgcggccagcgctatggatgtgggtctttccaccatgacgcgatgggtaaaacagctgcgtgatgaacgccggggaaaaacgccaaaagcttctcctattactccagaacaaattgaaatacgtgagctaaagaagaaactacaacgtattgaaatggaaaatgaaatattaaaaaaggctaccgcgctcttgatgtcagactccctgaacagttctcgttaatcgggaaactcagggcgcgttatcctgtggccacactctgccacgcgttcggggttcatcgcagcagctacaaatacgggaaaaaccgccctgaaaagccagacggcagatgggctgtattacgaagccaggttctggaactgcacagcatcagtcatggctctgctggtgcaagaagtatcgccacaatggcaacgctgagaggcttccggttggggtgatggctccatgaaagaactgggtctggtcagctgccagcaacctgttcatcaatataaacgtggcggtcatgaacatgtcactatcccgaatcatcttgagcgtcagttcgcagtcacagagccaaatcaggtgcggcgatgtgacatatatctggaccgggaaacgctgggtatataaaaatggaagcaatacgctgtctgaagcgttatatctcacgcgaagtttatacattactgcgaaatcaaaacagacagatcaacagcatctcgataacggcttgactcttagaagggcgtccagggtagccactatacaagcaggcagttccgacagtcactgtggcggtaccggatcaggcaaagtatgagtcgccgtggaaactgctgggataatagtccaatggaacgcttcttcagaagcctgaagaatgagtgggtaccggtgacgggttacataaacttcagcaacgcagtgcacgcaataacggactatatcgttgggtattacagcgtgctcaggtcgcacgaatataacggtgggttaccgccaaacgaatcggaaaatagatactggaaaaacgctaaagcggtggccagttttagttgaccactacaaaacgcgtatcgtcgtcggtcgggtcgtcttcgccatgatctgctggcgggttaatcgacgtgacttcaatgggattgcttggcgcaggaataccgagccgaaaactggccgcaggataattacctctgccttgggtcgcaatggcggaactggttaccttggggtattcgccatcggtaaaatacacccgatcatatttatcctgagcgattgggctatgtatcgcatccacctgtccgcgccaggcaaaccagaaattatcccggtaacggaatattgtctctggtttgaaggcaaaggtttttccgccgtcaccatcagccatcattggggtaattacgccgtggcggaagtggcaattacgggcaaccgtggcggcttgttcaggtaacagatgtgcgaccgcacgcggcatttcaccacgcatggtcgtgatatcaatagcgggcataatgagtgatttccgacaggcataaaaaaagccccactaaaaagtgaggcttggcatctttgggtaatttagcgcgtaacctgttcggcatcaatgatatcgtcgtttttttcgcaaccagagcatcaaacaacgacggataacacgaaaaccatgagcgagccaacatccaccttatcaataagtatacaatttgatagtattgtaaaagatattcagatgtattttgtgagttcggaattttaggtttttcaggaaattaacgtaagggaattatgtggctaatttaatttaatttatttgactataaaaggcgaaaaacaggggcttatctctgctggatgctcaacttatgactcaatcggcaataaatttcaagccggtcatactgaccaaataatggtctactcactgactcatggtatcaaccgggctcagaatgcgactcacttacctataaatatcgttaaaccaatagataaggcaacgccattattaggcaccgctatttctgataatgaagttttgcatctgacgttgacctctacagaacatcaagtaatggtcatcaagaaatctatttttccattgaagttagaaatgccaacatcaagcatgttggtataaattacccccatattatgaccaataaagatagccaacccgaagaaatgctcagtgtcacctaccaagatataaaatgggtccatcacgcggcaggaacgacaggttatagtttgtgggaagatagggtttattaagccgttatgacagtgactggtagtgtgccggtacatatatagatattgtctgctgtgtaccggtatttttttatttcttttctgataaatcttcccaattagttgagctgccatttatcaattgatagagggaaagaccgacggtagaatcgccagtcacttcgctgatgagtccggcagctcccatgtctctccatccaataatataatcctctcttatatggtggaaaagcttccaggcatctttttttagtaccgacctgaacagcgaaccggcagaaagagaaagatcaccgatggagaaggcgatatcaccgtctttatcatcgccgcccagaatccttgccgactgccggtatacgtttcttaatggtactagactaggatcttctcgatataaaagataatagccattctcccatacgttctctgaaccatgcaaaagtaaaggacttcccaaataggagcatgctgcccctaggctggtataacaaatccccccgccaccaattatttttaaccatccgcttacaaaaccaacctgtttcaagataatattggttattgaattctgttctttttttctttccacaatggcatatagcttcgcatttcccatatgaagagacatgcttacttttaaaagagattgatattggtcatgaagttttgtattggcttcggaaaattgaagtcgtcctaatctataaccagtaacgctggcttctgccatttaatattcatcgaaaatgaaatcactaataacggccccattatttaaatattgataagcaacatctctagccatgcggtttatcttttctcgctctctttctaatgccataatcgcataactatccatgctatctccctcctaatgaaaacaatactttaaaactccagaataattttttgaaaaaaggagtaaagatgtacattataacaaggcctggtaggtatatagcactaaatgttataatttctctactatccatcttattgatgaagaataagtaagtcagtattatacatagcgaataccaatacaaaccggataagcttaaaaaaaattgccagctaacgcttgtttttttatatttggcgagtttaattaatgtgccagcatcaatttgtttcattcccagcgcgattagtttgtttttttagctcgacatcatccatatgtttaattccttttaaaaataagtatctatgttagataaacgtagtcgttcgctttaaccagtttttatccaacgggcgaaagtttaacctcccccctctccaaccgcaaatctacccaccgcccatggggaatatccaccgcctggccattgctgtagccgtcccgtttattctgggcaaatggcggtgagttggggtgttcgcggtgataagtgcggatggtgataacaccagattcatccacttcccgttctaattgagcgtgaaaagcggattgtcttacaggccaaacactttatgcgagttcgtaattaaaccgaagcagaatcacaacgggggcaatgaaggttaacgcaagccatgagaaaacctcaaaagatcgcaatgtacatcaaattcacacaactggagtcattatcttttagaataaagattcaccgtcttctaacggtaatgttttcggaaagaagcactttatgttctatcgctgcggctaaaaggagagttagccacttgttttgttcatgatcgaaaccatcaacccgatgcgtttgcggcaatttttcgttggccggttgcatttttacacgacagctactaggccatgctgaaagcatgaggacagtacggcctgataatgtctaaagcgtgggcaaggttgacggaaccgtctcagcgttactcaggggcttcatagatattgacggtcatagaactgaagatggagtaatgtttattaaataccgagctcatccagttttcaaactcaactgtggaggtgaaggataactcgccgaaatttggatccataaagcggatatggtcttgctcatcttttatacaggcgacggcatgtcctggtccatcgtctggggtgagtagataacacatgttgtagcaccccttttcgtcattgcgtgctaggctcatcgcttgggcagcgaattggggggtaaagtcttcgttgttcactatataagtaccaacgtgattgaagtgatccttcagttcatactggattctggtttgtgcttcagggggcggtagggggtgatagtcatcgttaagatattgagataatacctgccatttggcagatgaatcggcaagccaagcgtaaaaaccctccccctgtgaattcttgacaagatactttgccgacatggccatgcagacgccgttatcggtcacattggttttaacaccaaacgcctcattgacgctcttggtaatctccgattgattgtagctggtttctatatgaccaaagatcgtattctgattggtgacattgtttatcatggctgaatctctacgtccttaatgtgctttatttccctgagttctctataacaagtgaaggggctcaggttggttttacttaataatattagaataatgagagttccactttcatatttcgtccggtcttgttgcaagaatcggtaatgactccaattgtgtgaatttgatgtacattgcgatcttttgaggttttctcatggcttgcgttaaccttcattgcccccgttgtgattctgctttggtttaattacgaactcgcataaagtgtttggcctgtaagacaatccgcgtttcacgctcaattagaacgggaagtggatgaggccggagttatcaccatccgcacttatcaccgcgaacaccccaactcaccgccatttgcccagaataaacgggacggctacagcaatggccaggcggtggatattccccatgggcggtgggtagatttgcggttggagaggggggaggttaaactttcgcccgttggataaaagaccgatgaaacatattggccgatgactacatttatccagtataaacactgattttttaaaaggacttaaatgtatggatgagcaagaaataaaagacaaattggttggtcttggcattagtagtttagatgcaattacattgataaaaattgcaaaaaataaaaaaaccactgtaactcgagtatttatttcaaatcatatagggctatatattggcacggcggcattggttggggtttattttttatttgcaagtacaatgagtgagaaagaattgatttcattctctgctgcttatatacctgtgctgtttataatttattttttaactccgttcttgaaggagtttttttggagtttaaaagttttattctctttgaaaggaatgtgatatgagtagctttactctttctgtcttggaaagaaaaaaagaggaaattaatcgtatcgcagtaaatgtcgcatttttatatttgagtgatataaggctacgaagcgggtttatcagcagtaaaatcaattggcagacaataacattagtgaattcaagctagggagattgtcgttcagtgaggttatgtctaacctccatgagcaatacaaaattcttgaagatagacattttgatttgatgcttgataatgctaagttatttgttattgccgaaaggaaaaaagaacaaaattctgcactgaacattatattaaagcaagtagggtttgttagcggcgggttgcagatagttggcggggccggaatatgtaaagttagcttgggaatggcatgtgcttcattaggtgtccattaatagcccacggagcatcaaacttgagtgaaaatgcacactatcttttattccgtgaagaaccggaggcaagttttttgcggtatgcctatcagcatactgctattgtgttaggaggaaccaatcagcagggagatatagcctattttgcccatctctctgacccgaaatgtcttccgtcgcctgcattatcccatcgatattattgttcagtgtgtcccctggtatctggcttactcactgagtttacgcaaccaaaaagagatgatggcagagcggggtattgtcgttgatcattccatactgcgtcgttgggttatccgcctggtgccgctgttagataaggttttttgcaaagctattcatcatcacggcgaacccgagagggcggcgattgataaaagtggtgccaacagcgcggttttggctatgctcaacgcagacaaactcgatgaggaaacgattaacctaagacaaagcaactatctgaacaacaacgttgagcaggatcactgcaacatcaaacgacggatacgacacatactgagattcagctcatctcgacgggaaaagacaattctggccggtattgaactaatacaaaagggcaatacagaacctgcaaagtgagggattatcatccgcggaatactcaataatcggtaacgcaacttttgccaacttcatgtcactaatgcgacagagccctataaagagccattttgctgaaaagtgtctcaataaagtttagatgtggaaaacgtaacgtcgggatgagacaaaacaaactcagtgagacaaaaatacagtctcactgagttgtctattttaggtttactcaaacaggataacagctactccttctctggagtggagtattttatcttactaaaaatgaaactctcaggggcggaaacataatcctggtaagctcaatatcactatcctgttattatgaccggggtaacattctggctttgatgatatatcggtgagatgttccatattgttctgggttgtccatataagaccttccttcaggaaggtattgtaaagatgttatcttcatcctgttgtataatggaaacgtcacttcaccctcggaggcatacaatccttcagaaacaccggcgtgtcctggctcaagatcaaagtgccacataattgttttacctgacacataacccattttaggatccttagctgtagacattatgaggggagattttatttctaaatccattgatttttgtacagtatcgctcttaccttcagattcatttataaactcagcaagccaagaataactattagatattactggcgtgtctccacggaaggtttcgttcacatctgctgaatgatacccagaccattcagcatcaattttgcccagagttttctgaacctctataaacttgtcgtgactaatatctcttgctgccggcttcatgtttctaccaatttcagcccacttgcttataaagttgtccatatcgataattgaatcataatgactgatattaagcttctgtaaggctattgtgaatgaagaatagtatggatattcccccccttgctgtttatataaagcggggtcttccttaataacccagtttttctttgctccattttgctgcccgggcatcgatggtggcggcggagggtttcctcccgccaccggtggcggcggcggagggtttcctcccatcatcggtggtggtggcggtggatttccccccatcatcggtggcggcggtggaatcatagtattgatagggattcttccatcattgtccttccacgccaccggattattccgcaccatcctgtacagattcagcccgtccaccgagcccgccgggtctgcacttagccatctgcccgcccacggttggtagtaccggtaaccgtagtagtacagccccgttgcgtcccgctccttgcctgaatacctcacggtcttgtagtttgcctccaccgcgctgcgaaccgtccataccgctgtcccgccgtacggatagtattcctccatgctgataagtttgccgtcgctgtccagctccagcacgctactgccggtcaggttatcgtaactgtaacgtaccttgtcgtcagtgattccatccggcctgccgctctcccagtgcagcatccgcacctgcgcacggctcgcctcacccacagtgataacctgcaggctttccgtttccgtatcgccatttttcgcgctgcgcagttccaagcccggaaggtacagcgcccgctgcgtctgcgcgctgttaccggttttctgtacactgaccttcagaatgcgctgactaccgccgtcatagcggtaattctcgctgtcatccgcactgccatctcgcatcaccggcgttaccttcaacagctcattacgtgccgtccagaccaggcccagccccggctgtagctgcgtctgctggccgcccgcagtgaacagtgcgtccacgtctgcggcgttttcggtcaagttgctaagcacagcccggttgctgcggttgcttacggtgatgttggttgtgtaaccactgcgtgttgccggggaatggcgtatctgcgtcaggttgctggcttcgtcgtaggtgtaggtgcgggtgtaactggtatatgcggagctgtctgtaggaaaggggacggtagctgacggtaaacggctgccctgctgtccgacgtttgccatctcgcgcccggtggcactgaccagttggtacaggctgtcgtaggtgtaggtattttccggcaccactttctgattactccagaagcgggttgcttcagcatcattggtgattttcagcacgttgcccaccgggtcatactcatagcgcaggtcctgcagcaccttggcacccgaagcgtggccggcaggtcgctccgtccggatgccggtcaggcgctgcgtctctgcctcgtacgtgtacgtgatcaccacgccgttgccgtgatcctcgcgttgcttctgcccggcggccgagtacgtcagggacttcacgataacctgttccgtacggtccctcaccgtcagccaactgcctgacaacagtcccgccacgtcgtacctcacgcgctgaatattacctttcgcatcggtggtggtcagcaccgtcccggtggcgtcagcagtggtcagggtgacatactcctcgccactgagcagatcattccatgcagaggcaccttctccttgccagtcagccacggtgtccgggttatccgcgtccttcagcagacggcgggtgacggagagcgagacgcctgtcagcgctatgctgtctgtctgcaccagtcctgccgtatcgtaatgacggacgcataatcccgccaggttcagagtcttctctgcgccagtattgccggcatacacgaagcgctccgtgatgcgggcgacttcagtgctgatctgctccgtcacgttcagtggtcgacccggaagcgccgcatcctcatactgccaggtgcgggtcaccgccaggcttctgtcctcagtgccctcatcggtggcgctgatatgactgaccacgataaacggtcgtccggcgacgtcgttcagactgacgctagtaccgttatccgccccctgtgtacgcagaacgcctccggccaggtccgtcaggtagctgaaatttacgcgaccggcgtcgtgcagccgcgggtcggcgctctgcgtcagaaagccgcgtgcgtcgtactggtggggtgtgatgcgttcatttgtcacctcaggggcatcagggtggcgatggtacgcgatgtcgcgcgcggtcaggccgcggttatcaaagaccgtgaccttcggggttctgctgaacaacgatgtgctcatggtattctcctgtttatgatatgtagccggtcaggctgcacaagaaatagctttgtcgcagatttattaatggtcaacgacaataccgcgctctgccatcatctctgttgggttgcgtaaactcagtgagtaaaccagatatccgcggccacactgaacaataatatcgatgggataatgcaggcgacggaagacgtttcggatcagagaaatgggcaggtaatattacaaaaaaaacagcatgttatataacaatgccttaatgcgacagagtctccgcgagtgcataaaattataactaaaatagaatctgcacctgatattcaaccacaggtgcagatgttatttattaaaaattaaaaattaaaaattaaaaattaagctagctgttcaagtcgtaaattattaatgaccttatactcctcggcctcgcccggataaatcatgagaatatccatcggtagatcgatgcccggcgctataacattgccctttgtactatcaaggaaacaccaaccattgaccgacttatctgtattcagctcaatccaactgctgtttgcattaagccaatcaacatcaaccatcgcgccttctggcaataagaaggagagctgccagctgcgaacctgcaccgaagatgaagtcaggaggaaatgatagctatacaaaaactctggtttatcccattgcttacgccagtgagatttatactcttgtgaaacatccaaatcgcgctgctccgtcacctgaatcaccgagctagcctgactgtcaccgttatttgtgtagccgtttggcatggtgagttttgctgtcatcgttgccgtccctgggttttcgcccatcaacggaatattgatattgacagacttgccggcggaaatatcaacggacggagggaaatatcctactgagacaatcgcagaatcggataccgttacgccaacagaaacccctttaatatcagatgattcagagttagaaatgttaagtacattgtaataggtttcgtcactggtcagcaccaaattggatgccacagacatcgtcaactcaacgttaatggcagtcacgctaacccgagtattgatttggttagcaccactattaatcacgccaataggcgtatgcagttgggaagtcaacgaggtcgagccaatcgatttacccgttaaagggattgaaaccttgacagagccattagcgggaagagtgccaattgcggcaacatttcctacagaaacaacattgttgttagcagaagagacatccagagttaacccactcacggcaatattacttttgtttgcaatagttaattctgcaacataggctttgttcagtgcaaaactgatattttctagggacatcgtaagattaacggtttctaccgggcgtgcgaccaccgactgagttgcatcattccaggttcccttgcccagcggatagctaaccagtgacgggatactttcaccggctgccaccgacagagtttccccgtccagataaagtccggaaaccagcgtaccattctgcgacattttgtttacgacactggagacgccatcatgaccgcccacatagaaaccgtacgactcaagctgctgtcgattaagttgaatatcacgtgaaataatgaggatatcacccaactcctgctcattgtaattaatattagtgtagagtgctattttacccgctgggcacttgttttcaccacgagcatttttaataagctgaatatctgacataataatagtccttgttctgaataagtaagcggaaaaggcaaaggtatgaaacctctgactaccgcaatatgattaggtaattaaaaattaaaagtagaacgttacaactgaaccaataacatactcggttcaattaattaataaaggtatttgcgggaaattaatagtagttaattacttatttggagcttgagggcattttataagacaatcattttttatataatggttccatatcaattgctcggactctttcgtattaaggtgctgtcatataatatgctgttttttgtgatattacctgcccatatctctgatccgaaacgtcttccgtcgcctgcattatcccatcgatattattgttcagtgtggccgcggatatctggcttactcactgagtttacgcaacccaacagagatgatggcagagcgcggtattgccgttgaccattacatgttgggatgcagcttatttcgacgggcaaagataatcctggccgggattgaactgatacataggatacgaaaagggcaatacagaacctgcaaagtgagggattatcacccgcggaacactcaataaccgataacgaaacttttgccaatttcatgtcactgatgcgacagagcacaattccaggcaccagattttaggggtgaaccattgacaatgagaacatctgtctgctatttcatttgccaggttttacctcccgtaaccgtacgatatcgggatggagaatctcactgtaactcaataataagtaaagggaattagtttatgaagaaatcatttattgccttatttctaacattctcaggttttgccacatccgcgtatgcacaagatgaattaacttatagcaaactgatgatgaatccagatataaagacagagtttaaaaagatgattgggaaacaaaagttgcctaagtgggtcacagaaggcggcacgtattcccctggctacaacgttgagatcggtgggaataaatatgtggtaatgacttcatgtaagccccatgattgtgcttcacaacgtatcgctgtgctctattctcctgaatcaaaaagattagcaggtgtattttctaccactgacgagatggaaacaaaccaaaagctgcagtggctgagtattccagatgagttgtctattgatggaaaaaccatcttattcgcggcactgacggggagtcttgataatcacccaaatagctttaacttaaagtaaagtaggtaaaggtggtgggtattcgtctaccaccgtactttgcccaaagcgctacattaaatcaggtcccgttagtgctggaagtatcaccaaagacgatttacaaatatattccagcagccgaacagggggaatgacgttttgtgacgccaccataaagtggattagtcgatacgcaagctgggcagtgccatgtcgtaagatattttcaaacttgatagttggctaagagcgaagagcaggtcttaactcttcgcatccgcaacatagattgtcatcgacttaatcactttaacagtaaccgtacccccagaaatgccatgaatcctccgcttaatttatctataaacttgcggtatctaatgtaagcctgacgtggtcggtcggttgataataagcatgaaacaagtgcataccagagcacatcaataatgaacgccattaaaggcaggataatatacatggcaggctgaatattagtggtaagcgctgcggaaaaaatactggcaaataccagagcggtatgggggttgctgatttgggtaaatacgccagtagtaaaagcttttgatatgctgatatcctctgtgcctactgaatgggtaattctgccggaaggacgacgaaacattttcagcgccagccacaaaagataacaaccaccggcaatcttcaggctcgtataaagtgacggaaccagagtcagcagggtatgaaggcccgctaacgcaatgaccgcaaagacaagcgcaccaaagcccatccccacggccaccgctaatgccgcacgtctcgaactggacatggctgttcgcgcaacgagcagaaaactggctcccgggctcattgcacccagaaggatagccaagccaattgcagaaagtgcaatcaaatcatatgtcataattttactccagccatttaatttacccttcagttctctcattgcgtgatccgcgcacctcatgaaccgagctcaatttcaacataacacgatgtcacccacttccgctttcactcaagcggacatcctggcctattagcttgagtgatgggcattccactcatcacgagtcatttcccacaactctgagtccagaaggccgctgacgaactgtttcttttccgttttgattaggcgcataccgctgctgactgaaatgctctgagaacggagatttttagttgcttttggagcacgcaatactgccctgttcaaagtgttaaaccagtaatctgtcgccgcaagactggcttcgcgcattaatccgcgcccctgatattcaggaaccagccaaaagccacgattattatcttcttcatcatctaggcagataacacctattaaattgtcaggattatcccggtgccgtatggtccaaacccaggcgactccttttgccatagctggcagcgcgacgttattaacatagtgcgctgcaccatcgtcaggatagggccagggaaccgatgccaccatataacggacaatttcccagcgtggaaagcgttcttgaatttgtgatgcatcctcagcaactattggctttaacagtaaacgctctgtttccagcgtgggtacttgcatggctcttttccttactggttaatatatccgtgaccattttttactgattcaatatttactatgatttatagggatgtacagaagatattcaggtaatcgggtggaagaccagaacccgctacgacgaagcgaagtttttgctggcacttgaagcgcgacgctcgcctttacttaggccataaaaagcttgttggatgtctcagggcgtgaagcggacttttagtccaagggtataaatgtatttctgactgctaaaagacatttataaaaatttaatgtcttaccctagagggataaaattacttgatcaaggcatcgcgcatgtggcctgcctcctccaagtaagatgggaaagcgcgtaataatcatttggtcgatcagatcttcattgaggaaattttgaattgttcgcgccccgtttcagggaataacagaaagcggagcggccgcgacgaagggcactttatggctttcccgcagcgtggctcacattcaatgctcaacggtgaccggcctcactattaattaacatactgtggattttgtcatgaccgcttctggcacttagcaggtggtcaaatctaattaacccagagtagaaaagggggcagactaaatactaatcagtaaaaataaatgccctgattcattgccaaaatattttctgataagaaccaatgcctttcctagaaaccgtccaaaagccatgactcagcccttcacaagcgataactcataaattatgctgtatgcatatacagtttgctgggctttcatcatgcgttttcactccctctcgccgctgcgcgaaattgttcctatcccgttgtttaatgcaacgatcccggctggctttcccagtccggcggcggattacgttgataggccaatcgatctgaatgagctttgtattgctcatccggcagcgacttattttgtccgggtgaccggtaattcaatgattggggcggggatttttgacggttcgctgctggtggtggatcgcagcatttccccgagccacggcgatattatcattgcctctgttgccggtgaattcacggtcaagcggctgtgcctgaggcctgtcgtacagttagaagcgatgaatcctgattatccgccgatagttctgcacgatggcggggatgatttggaaacttttggcgttgtccgtttcgttatcaatgaggcatccggtgtttgccctggctgatgtaaattcgttctatgcgtcctgcgaagccgtattccggccagatttgcgcgggcggcctgtggtggtgctcagcaataatgatggctgcattatcgccagaaatcaggaagcgaaggctctcgatatcaaaatgggtgggccatattttaagcatcgacagcttttcgagcggcacaatgtggcggtattcagcagtaattacgagctttacgcggatatgtccaaccgggtgatgactgtgctggaagatatggctccatcggttgagatttacagtattgatgaggcctttctggatgtcagcggcgtaagcaactgcatgagtctggagcagtttggtcgtaacgtgcgggcacgggtattgttatggaccggactgaccgtgggggtcggcattgcccagaccaaaacgctggccaaactggcgaaccatgcggccaaacaatggagcaaaaccggcggcgtggtggatttatccgatccgctcaggcaacgcaaattgctggcgataacaccggtggaagatgtctggggaatagggcggcggatcggtaagaaactcaatctgttaggtatcaaaacggcgctgcaactggccgataccagcccacagatagcccgcaaacatttcagcgtggtacttgagcgaacggtgcgcgagctgcgcggcgaatcctgcttggcgctggaagaatttgcaccgaccaaacagcaaattgtctgttcccgttcatttggcgagcgaataactgactatcaggatatgcgtgaggcaatatgtggctacgccgtgcgcgcagctgaaaagctacggggagaacatcagtattgccgaggtatctccgctttcatcaaaaccagcccctttgcggtgaatgaagcctactatggcaacgtggccagcacccaactctatacgcccacgcaggatagccgagatattataaccgccgccacgcgttgtctggacagtatttggcaggatggtcatcgctaccaaaaggggggcgtgatgctgggcgatttctacggtcagggcgtggcacaactcgggttattcgatgaaaactcgccgaaagccaatagtgaacagctcatggcaacgctggacagaataaaccagtcaggcaaagggaaaatctggtttgctgggcagggcatacagcgcgcatggcagatgaagcgagacatgctgtcaccggcgtacactactaggttgcaggatttattgaaggtgagggcttgatgttgtttggattcataggctgtttttttctgcatatcctgtgcccagtttccggctaggtattcccgctccgagtaatcccaccgagatcacggcgattaatcagtcagccgattacggcgaggatgacccaaccgacgacgatacgcgtttttatgtggaaacctacgtcactttatggttaagaagggccgctggggccggtatcgcaagaggtcacgatcacctatcctggcagtagtgtgggtccgtaccccctgaacatctcagttcccccatttactcagaataaaagggctggctacagtgatgtccagccggtggatattccccatgggcgctgggtggatttgcggttggagaggagggaggttaagctttcgtccgttggataaaaactgattaaagcgagcgactacggttatctaacatagatacttatttttaaaaggaattaaatgtatggatgagcaagagctaaagaacacattattgagtttggggatggataatgtcgatgccactctattgatcaagatagcaaaaaataaaaaaaccagtgtaagtcgagttttcattatgagcctgctaggtttatatatggggactgcaactcttattgccatatattttttatttacatataaaatggagaagaacgaggtgttgatattttcagtatcttacataccagttgtgttaataatttatttcttcactccatctttaaaaaaattattttggagtttgaaagttttagttgcgttaaagtggaattaacatgagtggttttgcgattaatactcaagaaagaaaaagaggatacaactcgtatttttcataggtctgtagctcatgcatattattgacataccccccagaagtggttttattaatagtgaaacggagttagttactgattatataaatgaatttaaattaggacacttatcacttggtgaggctacgtctaagcagcatgaacagtacaaaatattggaagaaagatatttttatttaatagcgaacaatgcaaagttacttgctgtaataaaaagaaaaagataaaaactcagttagcaatattgtcttggcgcaggttggtttcgttagtggcgagttacaagtaataggtggacatggtctctgtgcagcaagtatgggtgccgtgtgtgcttcatttggggcacctctaatggttcatgaagcagaaaatccatggggaaatacacattatttagtcgtgtgggaagaggttattattacatcattagaaaacgcgtatatctatgcggtagaaaaatcaggttagacaaaaatagcggaaaattgccactctatcggagatagagttctttctatgggggctggattcagacatgtactcaagccagatgcgtggaaattatttaggtatattaagaatgattctattataggataggaatactatggttgctcctgttagcccacaaaaatattgcaattcctccgtatctacggacatattctatcccgacgtcaatcgaaatattttttagacaataactcatttcctttttaggttgaactccatttttaccatcgagataatgtgctaatactcttgtttatttaaaataatacaagctatttggtgtctttatcgcaaggtaaaaacctaaaaataggtcaattaaaatagcaaaaacaacaaaactaccggtaggctcattggccaggttaaaccaataagaagcgcagtaaaaatccggattttccatgagggatcaacgctggtcaccagggtgataaccgtggagagggccattccaacccagtagatcatttttaaagcgatccatgcagatgacattgtaattccaaagccttgttaacgtacggtgacacagcaaataattaacaaagattttacgcccaccgattttagatcgccagccttaatcaggacgaaaacgtacattcgtatttttttctgttcaaaatatgcacaatacagatttccatttctgcacgcgtcgaaaagtccgttgggagtcagtctaagttttgtgataggaattattgcaatgatcggaacagcgtctaaggtgaataggttatgtaagccgtattcccgatgacttctgaccatggataatcctgtgattacactttattctgacgctgatttttttagtccgtatgtaatgtccgtttttgttgccttaaccgaaaaacaacttccttttgagctgaaaaaaatcaatctttcggataatgaaaatatgcagcagagttacgcccaactctctttcactcgccgtgtaccaactttgattattgatgacttccgaatttcagaatcgtcggctattactgaatatttggatgaagcttttcctgcccctgcttatcaatccctatacccgaacatgatgcagcaaagagctaaaaccagagagattcaggcgtggttacgcagtgatttattatccatacgattagaaaggcccacagaagtgctgtttggtgggatgaagtgcccgccgttatcgactattgccagtaacgcggcggataaactattcgcagccgccaattggctactggctgatggacaggataatttgaacggagaatggtctattgccgatactgatttagctttgatgcttaatcgtttagtgatgaatggggatgatgtaccggctaatttacagcgttatgtgtcctatcaatggcaacgcccttcagttcagcagtggttaacgctgtccaaataagccactacctattcgtgagatcactacctattcgtgaaatagtgaaggatgtatttcgtggctgtcagctgcaattatctgatgacgaatattgaaactgtagcagcctgcatttagatctaaggctgtatttccctgttaattattcaggatacctgaaccctgtaggttgggttgccgtcttgggtaacttggtaggcagtgacatgcagacattctttaatgatcacactgttgttttttaatccggttcgagagataaacgcctcacctccaataccggataagatcagtctagccgacgggccgaaaaggttgatttttgctcgatcattttttgtctgcgtcagacaagttactttatttttgttcattttaacttcgatcaatgaaagggtgtcgtccgaatttactaaaaagaagtcgggcactatccgctgaccctctgggttttcaaaacgaacctctcgtccccagcttataatatgttcgttgcgacataagaataatgctatttctatttgtaaccagttttcccaaccggtgatatccatatcgctaattagtcgtagtttgtgtttaaaatcgggatgatcaaagaaagtcttaagggctagtgcgtaactcattgaagctccatggcgaatcggttaattattaagtcagaaaaagggccgggaagcgtagtgtaaatcgaatttatctggcgttatgcgataattaacgcactgtttatcggtatttttatctcttacaatcggtgatttgctctttgagagtgtatctgcaattttatggcgatgagaatcaaggctgaaaagtgagagaacaggtcgctagagcggcttggaagtactgcgagagaattctgaacaattagcgctgccggagattgtatcttttaccgcgttaattaatttacgttctcaaaccgtgatggaacgtttagggttggagcggcagaaacccgattttgatcaccccggcgttgctgtaggttatccattacgtaaacattgttggtatcgtgtgacgtgagaacagtggataacacgctaaacgacttttctgtcatggtgaaaaaagtagtatattgatagataaagcaggctagcgtgtcaggcggaaattaaaatgttcaatcgcattaaaacggcacgttttgttagcgtaatcttagcgatcgttttcctgggcgcctgtagccaattaccacgtaaccctttgccggtcgaattaatggacgaagctgaaattcccggtatgccaaatattcgcgcggctgctggtcatatcagcccgatcttcgaagcagatttattgcaatcttataaagatgaacgaccggatcaattcctccgtcctgacggtcagcgagtctatccgcatttagcgctatccggcggtgggcctaacggcgcatttggcgcaggttttttaaatggctggagtaagaccggtaagcggccagtgtttaaagtggtaactggcgtatcgactggcgcgttaattgcgccttttgcatttttaggcagcgatcacgatcaggcgttacacgatttttataccacgacgacgacgcgagatatatttcatctcgataacttattattccgtcttttcttccgtgaggccctagcggataccagcccactgtcacagctaattgatggccatattactgcgcaattattgcgtgaaatagcggtggaatatcgtcatggtcgtcgtttgtatatcggaacggtggatctcgattctcaacgcttttttgtctggaatatgggctgctcgccacaaaaggcacgccggaatcattaatactatttcgcaagataatgctggcatcgtcctccgtgccggtggcgtttgctccggtctttttcgacgtggtggccaagggtaaacattatgacgaaatgcatgttgatggcggcgtcggagccagagtgttttataacggcggcgtattcagcggcaaaattgtgcgcgccagagccggtattacgaatagcaaagaagatatttatataatccacaacggccagctcgggccacgtcctgaacctacgcctcgattggttcggaatattgccatgcgtactttggattcttcgagtaaagctacggtggtcggggatttataccgtatttatgcgttctccctagccgagggagccgattttcattggatcactattccatcaaatcttgatatcaatggagccgaaatctttgatccagtgaagatggagaaactttatcaggcaggctacgccgaggcgctgcgtggccctgtatggtcattgcgaccgccgggaacgatcgaaatggatgtgctgctcagcgaggccgcggcacagcaggctagcgagacaaaatgacttcactgaccgactgtggctggataacggctgaacgggcagatttattgttgctgaaaggggttgttaatgtaccagaatttcaacggtgaactgacttgggctgaacgccatatgacacgtacgctggccgcagtggcggcattaccggatctcagccaggtgcgtctggcctgtaacatgcacctggatttgaaaatggcaccgctggtggccggtttattgagaaagggggcgcgggtttatctgacaacctgtaacccgacgacggtacaaaatgatgtggtggaatatctggtatctcaaggcgcagaagctcacgcctggcgagacatgagcgctgaagaatggtccgcttcgttcgatcgggcgctggcatggcaaccgacacacttatgcgaaatgggcgctgatttaacaactcggctgcatcagtctcctgatgggcctaaaattaaagccggcctggaagccacgggctctggtattagccgtttacaaggtctggctccgcgttatccgatttataactgggatgatttgccggtgaaagaggggctgcataaccgccatatggtggggctgacggcttggcatacattcttccaaactacgcatctaaccttgcatgagaaaaaagttgtggtgatcggctatggtctggttgggcagggcgtggcggcatcggctaaagcgtatggtggtcaagtatctgtggcagaaatagatcctgccagagccttacaggcgcgttatgacggctggcaggttgttgatttggctgacgctgtcaaagaagcggacgtgattgctaccgcgaccggtgcgaaaaatgtactttccggcgctcgtctggctgatgccaaagatggggtgtttattctcaacgtgggtcacgttgcagaagagattgataccgctttcttaaaacagtacccgagcagtgagccgatgcagcacgttttcgcctattcggttggagagaaaactgtgtatctgctggccgatggttccatgtttaatttgaccgcgggttatggcgatagcctgaatgcttttgatgtcacactggctgtgatggccgcggggattgggcatattgttggtgcaggggagtctgcggaggcggcggtgtatttattaccgcagtcagcttggaagtcggtgctctaacgcaccttgctgatatcaacgggggtcgatggatttcggtcggccgccggatttattgcaaaaagaaacggttgagttatcgattgccgctgccgccacatagacgatgaacagcaggtataaaaagagattattggtcatgttgcacctccattatcctgaacggataacgtctctgaatactgactgtgacatcatatgagcgataagtgaacaaaaaatgaacagtcagtgaaagattaatgacagtgaggcgagtattagcaatatttctaatgaagaaattgctttgatggagaattgtttagattgaattggactatttatcagacacttggtgtaatttaaaaacaatttaaccagcatgtgatcaagagggcagtgattgtgctacactatgcggccgataatcaaggataaatcatgaaaaaagtctcaattattgctcagtgcttagtaaatgctaagagtttcagtgagatgtcagaagctgaatcctcgatcaaaaaagtattcaatgatagctatagcgatcactcatttgacgaatggaataccgaagtttccgcgttgagtgccaagcgagttatcagcctggttgctgggtcatccaaggttcgcgtcagaggtttaattcaggaactgtggaatcactgatcctgctctgatacttaactcctctctgatttttcactgcgtagagcatgcctgtcatgccacgtggtgaaaagtagaccttcctgttgcagcggtaactcaccgccgttctctcttctcgggctggcacgatctctaaactgctttataaagcacaaattttaaccaatgacggcgttggcacagtttctttggcgcggttcacgtaacttcatgacatagacaaccacgaggtaagattatgtcattgatcgatagcttcagaagactgatcagcaaggctcaaactaaagtcacttgccctgaatgcggtaaggcatctcagcaggatacagaaaaagtgcagaaaaataaggcgttggtttgtctaaagtgcggcagcctatttttgcccagcgatcaaaaacgttaaccaaataccatcgctgcccagcgtaatagcagcagagccaggcaaatgcataacagtaccaggaacattttccagtgctttttatgtaatcttttggttaccatcattttcctcttatctatctggttcatttacgtcagtatagtaacgaaaaactatgctgatgagcagatatactctgtgcgcattgcttgagataaagtgtaatatgcgttgtatcaataatgtaagaaatagaattcgaaataaggaaaatcatggccactagccttcctcaaaaatatgaaaatgctgagcgttgggcatttggtgatactgaaagcgtcgcagatgagctattggcgctggtattgcaaggcgtaaaaacggccacttgtgcctctttagatggagatggcgtaccgcaggtgggcgatgtatttgtggtagtgaatggaaaaaatgtgccggcctgtgccgttgaactgacggaagtggatctcaaaacctacgatcaggtcgatgaagcacatgcttttgccgaaggtgaaggggatcgtactctggcctattggcgtaaagaacatcagcgcttctttgaggcttatgatatgttctcacctgatatgacattgatctgcatgaaatttaaagtgattgagacgttttgattttagtctgaaaacacgacttgttcggcaggaatgaataatctaacgattcgatacgaatactgcccgataagggttaaaaatattgagggaaaacccgccgtctgtcacctcgtgttattcgacggacgggttttcttgctaaccaactatgtcatcctcattacccaggcatcctgatgccgatcataatgtttcttatacaacaacgtttgtttcccatccaagagcgccggaacgctggtgtggtcatcccaaccgtctaattgcgtgcaaagatctggatctgatttgcagggaatactaagcgtattttcccctttggtctgctgaggggatatttgcgcatcatcaatctcaaaactgcctatttttaatactgactttctcattgaaactcctggagattatggtggtaggaggtgtgaccagataaggccgcattattgagaatagccgaggttattaaaagcgccaaatgcagacgtagaaaaatacgggtttttattcggccagtttctggatgttatattggttacgcccattatttttcgagaaatacagtgccttatccgccgctaacagcagatgagattgatcgatgtcgggtgagtgcactaatggatgataaaaactggcaccaatgctgattgtcactttctggaattcgctgtccgcatgtttaatacccatgatacgaatggattccaaaatatgtttagcgaccaacgctgcgccagcttcgtcggtatcggggagaattgcggaaaactcttctcctccatagcgagcgacaatatccgtactgcgttttagtgattttcttaaggcgcgggcaaccaatctcaggcaggcatcaccagaaacgtggccgtagtggtcattaaagtttttgaaataatcaatatcgatcatcaataatgccagtggcgtatctgtacgcttggcacgtagaaattcgtgagataaaaccttcttgaattcccgtctattcggtaatttggttaatgagtcagtgcgtgcctgaatctccagacgtcgattggctttaaccagctttagctccagcagcttacgctcatgaacatcttccgccgtgccataccagcaaataacgttaccgtcagtatccaggcttggcgtggcgcgaattcgcatccagttccagcccttttcaacgtggcaaaaacggatttcaatatcgagagattcgccggtgcgcagcgaatgctcccaactgaccagcgcgatatgccgatcctctgtatgaatggttctaacccattcatcttccaaggcctgtttgcgagtaaaaccggttattttttcaaatcggctgctgatatcggtaattcggccgtcgggtgccgcggtccagggaatttgtgggttcagctccaccatattacggtaatgttctttgctactgcgcagcgcggcttccatttgtttcaggcaactgatatctatcatggcgacggataatccggttacccggccttgggtatctcgagccgctttcatgcgaataaaaaaaatgtgtttctcgccgggcatctgaaattcagcgtccagaatattttcgttattataagcccgcagtagagcctgacgtagaataggaacaatgctcggcatgatctcaaccacttttcgaccgttaatttcattggcgtgtttacctaataaattcgccaaataatcgttaatggtgacgtagctcagagtggtatcaacaaaacataatccggcgggagcgttggaatagatagattctaattcaaataagcgctgtggggcgttgataggaaaatttgtcaagtcgcgatctatacctctataacctttgaattcgccgtgctcatcaaataacggaactccgctggtttcgagtaagatttcagaaccatcaatgcggagattacgattttttaaaccagaaaaagggcgacgctcggcgctgattttgctgaaaacatccatgaatcgctgtgcttcatccttgggcataaaatcatataatgatttaccgataatttcatggggcgctcggccaaagaactctaggcatttagaggatgaaaaggtgtagtgggcattagcgtcaatttcccaaatccagtctgagttattctcgataatatcgcgcaacttatttatttgttggcgtagagtcgtcgtcaaagactcatttttattttcatcatctggcatgatgtcactcctgtttgagcacgacttccttgagtaagaaaaactgtcaccatattctggcttgctgattgtatatcagccataaaatgaatacagcttattaggagtaatctgagcggctggtgttgaattaatccactattttataatgacaaaacattaaccaaagtagaaacataagtaaattttcagaataatgttttgtcagctttaaatttatcagcacactcggtagggaaactaaatatttaggcgttaatgggttaattcattattacagaataggctaaatctgtattaattactgcgaactcatctctgcgtttggacctcggtggttcattgatttttattcattttttatgatgccaggtaaaacaccagactgtccatgctacgaataataggtgacgttatcattttttgttatatacaaagttaattcttttgatgtgttatcggaaatattgagcggttttaggctaaagctattcatctaatttaagtgttcgtcaggttttaatatgaataattggtaatggattcttctataaaaaacgagtttgaccgaatgtctatgctgacagggttaggattttatgccaaaaagagattgattgttgcagcgttcagacaagaaaataatactcggtcaatatgcagagaaatatggctagaccataattagaatgcgtaatgacaccctagggctttcatataatcatcaaggagtctgactcgaatcttgtttacctcaggtttcctcttcttcttttttagcatatcggattctttaaaaaaacgccggatggccataaacgacctatccggcgagcttatttagagaggctagaagcgaggaatcgctgtaccccaattgcgccaatctttaggttcttcagtattcagcaagaaatgctgattgaccgaagccttcggtgccaatggcgttgtcggtggcgttgcaaaggcgataccgccgcgaataaattgctggaaggtgccgcttttcactacgccgccggttagaccaaactgtaggttatagccggaagccagccagaacacactgttttgccgaacgagctgttggtatttcttactgattcgcagcgaaacctgtactcgatctgacatcgcgccaagattgaatccggtgaccgtaccgacctccattccgcggaacaagaccggcgtgccgatctgtaatgaaccggcttcggcagtatccagcacgatgctcagaccgtctagatagcgcgaatcagtaatggtagcggtttgtagttcgaaattacgcaatgcctgcccacgccccggttccacgttaatatacggctggagtagggtgtccaggttattgacgccggcggcggaaatttccggtgaaacgatagagaagcgggtgccgaagcgagcaaagctctccacgtattctggataaagtaccgctttggccagaacttcgttgcgctcggcggacaatttcagcgattcgacctgaccaatatcgattcccagataacgaataggcatacctgccgccagtttgctggcatcgtaagtgcgtagcgtaatttggctccccacggcgcgggcggcggtttctgtggcatacagggtgcgtttaacgcctttgcccaaggttacgccgtcgagattatcgaagctaatggcgcctttgagtgcccggttcaaaggcgaagcttgcacggtgagtccgctgccgtttaactgtacttttgctccgccctcagcccagaagatacttttactgctcaacaggttacggtattccggctgaatataaacatccacctcaaactcattggcttttgggcgaacattgactatttcgccgacctgaaacttgcggtacagaactaccgagccagtttgcacgtcgggcaagctgctggccgttagagtgagggtcgtcgcaggcaggttacccagaataccgtcttcagccttttcgcgactgctgtagagcggatattggcttttcggttcacctttacccccggccagcagctgaataccgccgtcaaaccattcttgtgcgctggcaccctgaacattgatgccatcaataccgattttgacgtcgatacggctgttaaccacgaacttgctatcgttatgcaccaaatgacgatatttggcctcaatggcagcggtaaaggtgataccggaatcatccagcgtgcgggtaataacctgcccgattttaatgccgtgcagcacaataggttgcccgacatcaataccgtagctttgcggcgcggtgagggttaacttcagtacatccggctgctgtaacaggcttttgttgctatctagtacgataaagtgctgttgcggctctccgtctccgggaaccagctctagcgtattaccggtcaataattcactcagcttggtatcattgaggctgatacgtggactgttcatttcgatacggctgccggtacgcataagatcgacaaccgaaggatcgatggtcagttcgccggtgaccttactgtctggttgcaataccagtttggtcaatgtaccaacctgtaatccctgataaatcagcggggtacggccttcagccagattattgccattgggtaaatccaaggttatggctacgccgcggttactgtgggccaaatcggggtacaactggaactgttgatcggttttggcatcctggctttgctgcggtgaatcaaaggcaattgcgccgttaaccaaggccgccagactctccatctggactgacgcgccgctcaggctaaaatcgcctttaaaacctgagacattccagaatcggctgtcatttttcaccagatgagcgaagcggcgatcaatcagcacgtcaatgattacaccattgttatccggcgcaatgttgtaatcataaactttgcctaccggaattttgcggtagtacaccagagaaccggtattgagagagccgagatctttggcgttcaaatgaatcatcagctcgccggtattcaggcggaatttgggttgagtatctaacgcggtgaaatgggtttgcggtttaccgtggcccggcatcataccgatatagttaccaccgaccagtgcgtctaacccggaaaccccggccagagaggctttgggggtaaccagccagaattgggtcccttctcgcaacgagtcttccaaatcgtttttaatactggcagtcacgacaatgctgcgtaagtctttgctcagactgatggattgcaccgtgccgacttcaaccccttgatatcgaataggggtacgaccggcgacaataccggcggcagattgaaaatcgattgtgacttcagctccgcgatcttgccagttggtataaaccagccagcccgcaatcagcagagcaatgaaaggcagcagccagaagggtgaaattcggcgtttgtgcctaacctgagcctcagtcggcgtattcggcgtttcctgttgcatgtgcatcccaaatcaatcggctatccagccattcaacggcaagaatagtcaaaattaccgcagacccaaagtaaaaggcagccggtcccatagtgaacgaaagtagctgatctctgttgatcagcgacatcattaacgcaataacgaacaaatccagcattgaccagcggccaatccaggtaatgacacgcatcaaacgcatacgggtcttcaaactgtgctgagttttcaaatgaatactcagcagcaaggtaatcagtacgataactttagtaaaaggaactaatacgctggcaataaataccacggcggcgatcggcatattgccggaggaggccagagaaatcacgccagagaaaatggtatcttccatacgcacgccgttggcgtaaacaatcgagattggcagcaggttggcgggcaatagcagcaccatagaggcaatcaacgcagcccaggttttttgcaggctgtggcggcggcgatggcgcagcggcgtgtggcagcgcggacagcgacccttggcgtcaggatggccggtatagtggcaggagaggcaaacccgcagcgtttcccttggccccggcggctgttcctgcgggtaaaagcgttcccacagttgctccagattcaggtgaattagcgtcagaatacttaataaggttagcgccagataggccgtaagcccaagccctggggaaatgtcggcatattctttgactttgatacaggcaacagccataccgatcagatagatgtccagcatcacccattcttttaatctctccagcatcagtaacaccggccgcaaattcatgccgatacggctaccaatgcgcagataaaggagagaaagcgtcagtgtgagcggcgcgccaaaaatacagaaagccaccatgctggcggttaaggggtcgccttgtttggtcatctgccagatgccttccaacagactggcatcgatatgggtgccgagcagacgaatgctgattaagggttcgctaaaggcaaagggcatcaacagtagcattgctacggccattgcggttaggcgagtcagggaccaatcacggccgctgacgaccttggcgcaacagcatgggcaataggcggcctgattaccttgcattggtggcagggtaaatagggcgtcacattcgcagcagcgctgttctcgcgcggtggaaagagggcggtaaatcgcttctatcttcataaatatctaatcgatggctccgccggtgatgaaaagcccaatagcaatatgggtaaatgccgaaccagggtacagaaagtcgaggtatataatttggagcacattaaattcgcagcgcatcaaattacgctataaatcaaatatagtgtgcgacggggctgagccgcggtttttattctcgaacgtgacagcataacccgttgtgtgaaccctgaaaatcagtcaattccctattgtagggaactcttttactcagttaaagatgattagccttgtggcaatgtacatttaatgcttactttagagaggctaagcaccggttgcctctggctattcttaggtttgttaatggttacgacatgaaaaaagaagaattctacgcggaattaaaacgcgatatgagagcattaattgctggtgagcataattttatcgctacactttccaatgtcagcgcgctgttgtatgagcgcctcgacgggttgaactgggccggtttctacctgatggatggcaatcaactggtattgggaccgttccaagggaaaatcgcctgtgtacgtattcccgtgggtaaaggcgtgtgcggtacggcagtgtcagaaaatcgcgtacagcgggttgcggatgtccacgctttccccgggcatattgcctgtgacgccgccagtaatgccgaaattgtcctgccaatcgcgataaacggcgttgtcatcggggttttggatattgacagcacagtttatgatcgtttcgatgaagaagacgaaaaagggctgacgtcagtcttggcggggctttgcgcccatcttgaacactgtgacgttgcgaaatatgtcacacagactgcaagttgatacacggataacgtggcaattgctggaggcgtcattataatgacgcctgttcatgcctgcgctggttggcaaacccgttgtaatcaggaaatttcatggaaaatcaacctaagttgaacagtagcaaagaagtcatagcctttttggccgagcgattcccgctttgtttcaccgccgaaggcgaagcacgcccattaaagatcggcatttttcaggatctggtggagcgagttcagggggaagagaatttaagcaaaacgcaattgcgttcagccttgcgtctatacacctcaagctggcgttatctttatggggtcaaagtcggagcagagcgtgttgatctggatggcaacccttgcggtgtgctggaagagcaacatgtcgaacatgcccgcaaacagctggaagaggcgaaagcccgtgttcaggcacaacgtgctgagcaacaagctaaaaaacgcgaagctgccattgctgcgggtgaaaccccagagccacgtcgcccacgtccggcaggtaaaaaacctgcaccacgtcgtgaagcaggcgctgctccggaagctcgtaagcctcgtcagccaaatcgcccacagcaggcccgtgctcctcgcccagcggcagaagagaaccagccacgccctgtgccggtcacagatatctcgaaactgcaaattggtcaagaaatcaaagtcagagcaggcaagagtgcgatggacgcaaccgtattagaaatcgctaaagatggcgtacgggtgcagctatcttcaggtctggcgatgatcgtgcgcgcagaacacttgcagttctgatacggaggccaacctaggcatgaacaaatttgtcagattaacagcattagcaggcttgttactggcgggggcgagttacgctggcgatacgactacttatcgtatcgatcagttacctcaactgcgtcaagagcctcagcactcgacggtgagtgagcgcgtcgcttcgcgcttcactcgctctcattatcgtcagttcgcgctggacgatcagttttccgccaagatatttgatcgctatctcaatatgttggactacagtcacaacctgttgctggcatcagatgtggcacagttcgccaataaaaagaattcactggatgatgaattaaaatccggtcagttggatacgccttatgcgctattcaacctggcgcagaaacgtcgtttcgagcgctatcaatacgcattgtcagtgttggaaagaccaatggactttaccggcaatgacaccatcgatttggatcgcgccaaggcgccgtggcccactagcgaagccgagctaaataagctgtgggacgccaaggtcaaatatgatcaacttaatctcaaattagccggtaaaacggataaagagatcaaagaaacgttgaccaaacgctaccagtcagccattaaacgcctgacgcagagcaacagcgaagacgttttccagctgatcatgaatgcttttgctcatgaaatcgatccgcataccaattatttgtctccgcgtaacaccgagcaattcaatactgagatgagtttgtctctggaaggcattggcgcggtattgcaaatggatgatgattacaccctgattaactccatggtgcccggtggcccagcggccaagagtaaggcgattaccgtcggcgatcgtgtggttggcgtcggtcagaccggtaaacctatggtcgatgtgattggctggcgtctggatgatgtggttgcgctgattaaagggccgaaaggctccaaagtgcgtttggaaatcctgcctgcgggcaaaggaaccaaagtgaaaaccgtcaccctgacccgcgaacgcatccgactggaagaccgagcggttaaaatgtcggttaaaaccattggcaaagagaaagtgggagtgttggatattcctggtttctatgtcggtttaaccgaagacgtgaaggttcagctgcaaaaactggccaagcagaatgtgagcagtattattatcgatctgcgcagcaacggcggtggcgctttgaccgaagcggtctctttgtctggcttattcatcccaagcggcccggtcgtgcaggtgcgggataataacggcaaagtgcgtgaagacagcgatgccgacggcattgtgtattacaaaggcccgttagtcgtgctggtggatcgttatagcgcctcggcgtctgaaatctttgcggcagctatgcaggattatggtcgtgcgctgattgtcggtgaaccgactttcggtaaaggtacggtgcagcaatatcgttctctgaatcggatttacgatcaaatgctgcgtccagagtggcctgcattaggttcggtacagtacaccattcagaaattctatcgcgtggacggtggcagtacccagcgtaaaggcgtggtgccagacattgtgatgccaaccggtgtcgatccggcggaaaccggtgaaagctttgaagataacgcgttgccgtgggatcgcatcaacgccgcaacctacaccaaggttgatgatttgaaacctttcgagccagcgttattgaaagatcatgcggcccgtatcgctgtcgatcctgaatttaagagcattcaggaagatatcgtgcgctttaaggcgttaaaagcgaaacgcaacaatgtttcccttaactatgcgcagcgtgagaaagagaatcaggaagacgacgccacccgtttggcgcgcttgaatgaacgtttcaaacgcgaaggtaaaaagccgctgaagtctttggatgatttacctaaagattatcaagagccggacccttatctggatgaaagcgtccatattgctttggatctcgcccagttggaaaaagcgcagcaaccagccgctaaataagccgccagtgatgcaaaaatcatccggggtctcttatgaggccccggatttttttatggtacgagtgggccgtgatcgtaaaaaacgcgctaaaggatcgccggagtggctggggcggcggagggaatcacggggaaaacggcgcaggaagacgactgaatgtgataaaatatgttcaaatttgtaaagttatgttgatttaatcagttacggcttaacaagccttgaaaatttattagatgcccataggatcaggatatctcaataggaatttcggtaaacggctaaacaaataaggaagtaaaaatttatgatgcgtatagctctgttccttctcactaacctggcggtgatgttggtcttcgggctggtgctaagcctgactggaattcagtcaagtagtatacaggggctgatgattatggcgcttctgttcggttttggtggttcattcgtttcactgctgctgtctaaatggatggcgctgcgttccgttggtggggaagtgatcgaacagccacgtaatgaaaccgaacgctggttgctggataccgtacgtcgtcagtctcaacaggttggcatcgctatgccacaggttgccatttatcaggctccggatattaacgcctttgcgaccggcgctcgccgtgatgcttcgctggtggcagtgagtaccggtttactgcaaaacatgagccgcgatgaagcggaagcagttatcgcccatgaaatcagtcacgtagctaatggtgacatggtcacaatgacgctggttcagggcgtggtgaacacctttgttatctttatttctcgtttaattgcgcaggttgtcgctggttttgtgtctggcgatcgggaaaacgaaggcagttcttctggcaacccaatggtgtatttcgccgtgtctatggtgctggaactggtattcggtattttggcgagcattatcaccatgtggttctctcgtcaccgggagttccatgcggacgctggctcagccaaattggtgggtcgtgagaagatgattgcggcgttgcaacgcctgaaaaccagctatgagccgcaggaagaaagcagcatgatggcgttttgcatcaacggtaaatctaagactttcagcgaattgctgatgtctcacccaccgttggacaagcgcattgaagcactgcgtactggcgaatacctgaaataagccacaaccgcttgtggtgaagcagttagaaagccccgtgaatagcggggcttttttgtgcctttttattgtcgaattttcagcgcgctagctggttttagatgaaatgcgcagcaggctaaccaccgccgccagcgtggcaaaaccgccggcaagtagcaaagaagcataagtagcattgtccgcaaactgatggaacattaaggccactaacgccgcgccagaggtctgccctagcagacgcgaggtgcctaacataccgctggcaccgccgctgcggttgggcggcgcggcagaaatgatcgtgtgattgttcggcgactggaataaaccgaagccgacgccgcagagcatcatgcgccagataatattcaaatcgctcggattggccggaagagttgctagcaggaagagtccgctggcgaaaactgccagtccgatgccgcccaacagacccgcctgatagcgttccactaaccgaccggcaatcggtgcggccacaaccgttgccagcggccatggggtgagcaacagcccggtcgccacttcatcccgccctaacacgttttgcaggaagaacggcagcgacaccatcgccagcatttgtgcaataaaagaacaaatcgaggtgccgacggagagggcaaaaatcgggatacgtagcagatcgacgggtaataacgggaaaggttgcttgagctggcgacgcacgaagaaaaaaccaatcagtaatagcgctatgatttcaccggcaattagcgtcgggctttgtccttgggcaaagccgctaatggcgataatcagcaggccaaaggttatggcattcatcagacaactgacaatatcgaatttattaccgttactcttggctacgttagcgggtaagtatttcatgcccaaacaccaggcgagcaggccaattggaacattgatggcaaaaagccattgccaggatgctatcgatagtacggcggcggcgatggtagggccagcggcggcagaaaaggccacgatcagggaattaatgccaataccgcgtccaagttgggctcgcggataaatgattcgaattagcgccgtattgacgctcatcagcgctgcagccccaaacccctgtaatacccgtgcaaaagtcaacgtccaaagggaatcggacagggcgcagaataatgatgtcaggctgaaaataagcaatccagcctgataaacccgccggtagccgatgatatccccgagggatgccagtgagagcagcgaaatggtgatggctaactgataggcattgacgatccaaatagaatcggccgggctggcattcaaatcgcgggcgatggtgggtaacgctacatttgcaatagtgccatccagtaccgcaatagtaatacccaaagctatcaccaaaatggcggcgtagcgctggggaaccggcaacccatcagtctgagaaggtgtcatatggaattttatctgtaaaagtaatgaaatggctaagtattataatgctaacggcaaaggtggcagattgcatctttgccactcggataattgtcatagctaattgtcataactgattgtcaacgaatgtgtgcaggatgcaggagtggccaaatcatcatgataagacagataaaagccagaaaatatcaatgctattggctaaaacgaaactgcgatcacggaaaaatgaaacatcgttcctataatggattgtcacatgttaaccagctgatgctgccaacatttttcattctctgacgttttaaggattcctcggatggccaaaggtaaactcattccactgacatttcacacctatcaggatgcctctaccggtgcccaaattactcgtttaacgcctcaggacgtgacctgtcatcgtaactatttctatcaaaagtgcttcactcaggatggccgtaaactgttatttggcggcgcttttgaaggggcgtggaactattatctgctggatttgactactcggatagccactcaattaaccgagggaatcggcgataatacttttggcggttttctgtcgccaaacgatgacgcgctatattacgtaaaaaatggccgtaatctcatgcgggtagatttggattcactggaagaattcttggtttatcaggtgcctgacgggtggatggggtatggcacttgggtagcgaattcagattgtactaagttggttggtattgaaatcaagcaggaggactggcagccgttaaccgattggaagaaattccacgatttctatttcactcatccttgctgccgtttaatgaaagtcgatctgcgcaccgggcaatcaacggtgattcttcaggaaaaccaatggctaggccatcctatttatcgtcctttcgatgatgctaccgtcgctttctgtcatgaaggcccgcacgatttggtggatgcacgtatgtggctgatcaatgaagacggcacgaatatgcgcaaagtgaaaacccatgcgccgggagagagttgcacccatgaattctgggtgccggacggctcggctttggtttatgtttcttatatgaagggtagcccagaccgttttatttgcagcgccgatccgctcacgttggaaaatcgccagttgaccaaaatgccagcctgttcccatttaatgagcaattatgacggttctttgatggtgggcgacggctctgatgcgccggtagatgtgcaggacgatagcggctacaagattgaaaacgatcctttcctgtacgtattcaacatgaaaaccggcaaacagcatcagatagcgcgccacgacacctcatggaaggtatttgaaggcgaacgtcaggtaacccacccgcatccttcttttacaccagataataaacaagtgctgtttacttcagacgttgacggcaagcccgcactgtatttagcgactttgcctgaaactgtgtggttatagcatctttgctctggcctccggggtaaaaagaggccaaatccctatttctcagtgtgatatcagattaattatattgcatcattgcgcaatctcaccgcttcctcttataataaaaccattgttctattttttttaaaacaaaaaaacgagtagggtaacgacacaatggctacgaatgattttgataaacagcccgactcagtttcgtcggttctgaaagttttcggtatcttacaagcgttgggtgaagagcgagaaatcggtattaccgaactctcgcagcgtgtgatgatgtccaaaagtacggtttaccggtttctgcaaactctaaagtctttaggctatgtggcgcaggaaggggaatctgaaaagtattcgctgacgcttaagctgtttgaattaggcgcaaaagcgctgcaaaacgtcgatttgatccgcagctcggatattcagatgcgcgaattgtcgaatctgacccgtgagaccattcacctgggcgctttggatgaagacagcattgtctatatccataaaattgattcgatgtataacctgcgaatgtattcccgaattggccgtcgtaacccgctgcacagtaccgctattggtaaggtgctgctggcctggcgcgatcgcggcgaagtggaagaaattctgtctcatatcgagtttacccgtagtaccaaacacacgctggacagcgctgcggtgctattgccagtgctggatcaggtgcgtgaacaaggttttggcgaagatatcgaagaacaggaagaagggctgcgttgtatcgccgttccggttttcgaccgttttggcgttgccatcgcggggctgagtatttcattcccgacgctgcgtttctcagaggaacataagagcgattatgtaaagtcattgcatcaggcggcgcgtaatatctcggaacaaatgggttatcgcgactacccgttttaatgggcggcgtttaatgcattattagctaggtaaatccagcggctcctgattcaggggccgttttttttgctggtttcccccatgatggtaaattcttaaggtgcaaatgatacttatgcagaatgtatcgtttacataccatttagtttacatcagttactgtgaatcgagtttatcaaacgacagggagtgtgaatgatgaaaaaattattgccggcggcgctgttgctgcttttggctgggtgtagcagtagcccgcataaattgatcgatcgcggtgattatcaggtagataccacccatcctgcggtggggcagaacgatcgggtgcgctttctagtgttccactatacggcggttgacgatgcggaatccctgcgattgctgactcaagagcaggttagcgcgcattatttggtgacggaacatccgcgtaaagaaggtggcaaaccggtggtactgcaactggttcccgaagataaacgcgcctggcatgctggggtcagcgaatggcaaggacgtaccagcctgaatgatacctcgataggcgtggaaatcgtcaatctgggctatacagaggagctgctagggcgtaagtggtatccgtttaacgaaaaccagattgaattgattgagcggctggggaaggacattgttgcccgttatcatattgctccgacagatgttgtagcgcatagtgatattgctccgcagagaaagtccgatcccggcccgtatttcccgtggaaacgtttatatgaagctggcattggcgcttggccagacgaagggcgggttcaggaactgattgatggccgtgataaacacgagctggtgccggttgagtctattcagaaagcgttagcgacttacgggtataaaatcccgctaaccggtgaactggatgaggaaaccctgaaggtgatagctgccttccagatgcacttccgcgccagcgatttcagcggcgtaccggatgtggaaaccctggctatcgcacaggctctggtggaaaagtaccgtagttaatccagtttgaagaacccaggtgaaacaaaattgaaaaagccggacagtttacgctgcccggctttttactgattacgataagtgagacatttagcgatgcgctaattccacctcgtcatcactgtttagaatctctttgtcggtttgtttcatcaattggctggtgatggtaccggcagtcatagaaccgcttacgttcaaggcggtacggcccatatcaatcaaaggttcaacggagattaacagagcaaccagcgtgaccggcagacccatggctggcagtacaatcaaggctgcaaaggttgcgccgccacctacaccggctacgccagctgaactgacggtgaccataccgaccaatgttgcaatccaaatcgggtccagtgggttgatacctacggttggagccaccatcaccgccagcatagccggatacaaaccggcacagccgttttgaccaatcgttgcgccgaaggacgcagaaaagctggcaatggattcagggatacccagacggcgagtttgcgcttccacactcagtgggatgctggcagcactggaacggctcgtgaaggcaaatgtcagcaccggccaaactttcttgaaaaatttcagcgggttgataccggtaaaggcaatcaacagaccgtgaaccacgaacatgatcgccagacccagatacgaggccacaacgaagctacccagtttgataatgtcctgaacgttagagccagcgacgaccttggtcatcaatgccagcacgccgtatggggtcagtttcataaccagacgaaccagtttcatcacccaggattgcagggtatcgatagcaaccagtacgcgtttacctttttcaacgtcgtctttcagcaattgcagtgaagcaattcccagcagagtcgcaaagataactacgctgataatcgaagttgggtttgcaccggttaaatcggcaaacggatttttcgggataaaggacaaaatcagctgaggcacgctcagatccgaaaccttgctcagataattgctttcaatcgcgcttaggcgagccgcttcctgagtgccctgaaccagaccttcagcggtcaggccgaacagattggtgacaaatacaccgactaacgccgcaatcatggtagtaaacagcagggtgccgatagacaggaaactgattttccccagcgacgccgcattatgcagcttggcgacggcacttaaaatggacgcaaataccaacggcatcacgatcatttgcagtaattgtacataaccgttaccgacgatattgaaccaggtaatagattctttcattaccgggtcgtcagagccatacaccaaatgcaggccgaggccgaacaccacgcctaatgccagaccagccagaacttttttggccaggctccactgtttgtgacgggtttgtgccaatagcaacagcaatgcgacaaaaatcgccacattaattacgagcggtaggttcatccccaaatctccaaaattctattatgaatactttttgcgtattctatttatattgctgaccttgataggtcgcgaagccaactatcctaacagttactgagttggctcacttatatccaaaaagaatttgatataattttttacgcaaatttgtataaagtatatgctttgggtgatgatttcggcagttaattgtgatcagagtttgaaactcttcaattgctcaacataggattggacgggaaatgagcggtcgctctgccagtaaacggcgtagcatactaaaagtacgcaaaacacgcgttccagctgattccctttttgcgaattgagcagaggcaggcgaaaccgccaacggcacggccacagcagtggtacgccagcaggcgtcagcatatccgccaataaatggctgaaatagccgacgatcatcgcatgcatgacgtcaggtgggataaaccaactgcggggaatttcaagctgaaataacgctattccaccgaggatcgctaataaactgtgggtaaaaccgcgatggccaaaaatccgtgcaataggcgcggaaatccacttcaagcgttgccccagaacagagcggggatggtcaatatcaggtagtagagacgtcaaaagggcgcccggtataatgtgccaccagtccccctgtgtaagctcgggagtcaacccggcttttttggcaaaaattgcgcaggcgacagaaaaaatcaaatgcccttccgcggtcatacaaacgtcccaaactataactgttaatttatccagtatatgggatttctctgggtgaagatagccgttacgctgtaactaaatgtcacattaggagtgattttagggtgaatgttgttttttcagacaatccacagctggcgcgtggctgggcggcggatattacaggaaatggaaggtgaaaaaaacggggaaaagcgactgggagtcagatttttccccaaacacgggtaacaggtttgcagcggcagttactgcaatactaatgatgagtattcaatcaaatcggacatactgaggttataacggtgaccaggttataacgacgatcagaaggtgtactgcacccccacgcggaaacgggtctggcgttcgtcggtcaggctgctgccagaaacattgccgatagccacataaggtttccagtttttatcccatttgtaggccaatttgacatcatgactccagtcatacttttcgttatttgccagaattttgtcctcagattttttgtaatccaactcatattcgacggagtaatctttcaggaagttataggcaaatagcagggtgaattgatggcctttctcagtatctttggtggaaggctggttacgtttgtaataagggcgatagcgtagagacgtagagaaatcgtcagtaaaggcaactttgccgcgtaaatatggccggtagttattgctgtctgatgaggattccagagagaagcccggttccaactggaaggtcttgttaaatttatacacatagctggctaccacttcggtaccattactgacctgttcgtgaaaaggtttgtttgcggtgttgtccgagctgtgttgccgccatttgccttccaaagaaaggccaaagccgttagcgaaacggttagagaacagcagacgatctttatgatcgttcgaaccgctatccagcatttcatgacgataatcgatagttgttgccacagagctgaaactgataactgatgccattgccagagtaagtaatttaaatttcatttttataatccctgagtgatgtattttcgcatcaataaagaatacattcttaaaaaagaaacatcgtttcatttattgtggttttatattctatttattattttaataatttttgtgatcgatgtcgtcattgttccctaataaaataaaagcattttaaacttgtgatgacgatctaattgattgtttttattgtaatttaatcaagcagaaaaaccccgccaaataaatggcagggtgagtttagtgccttattcttcgatttatcgcatggcgcgttttaaaattcggtcaccctgacgattaaaatattctgcagtttcctctacggttttctgaccataatcgatgtattgaatggcgtcgccaaataaagaaacaatttgtggatcatcgaaataaggcgaggttttcatttcgtgcggcaaggctaatgccatatttaggccagatacggacggatcggtatcttgaatagtgccgctggtgcgtaattgttcaaccgccgtcgcgctaagcggcacgccgcgttccaacccaagcgcttccacaccttctttgctgtttagcaggaagttaatcagaatggcgctttctttcggatgttgggtagatttgccaatagacagcatttgcgcaggtttaaagaataaaccggcatctttggcacctggcagcattgggtaggggcctaacaccaatttagccggttttttcaggttgtcggagtatttattaatggtggagttccacatatatgtaccggcccactcaccgttaatccagggtttcatttcgtacatattacttttgccgaaggatgcatagtatttggtcgaaggcattacatggctatctaccattttcttatacagagtaaaaaactccacccattgctctttgctataggcaaattttttgttggcttcgtcaatcgttggaatattgtatttttgcgtcatataagagcgaattaacgccaatgtgtcctgatgctctaaaacgacgggataatattggttgcccagtttttctttaaatacggcgcctgcggctagcagctcgtcccaattttttggatattctagacccgcatttttccaggtttcatcgttaaaatagaaaatacgggcggtaaccgaaatcggaataccgttcagtttaccgttaaccgtagtttgctgtaattctttgggatcgaactgatccaaatccaacgtgtctttgactttaaataaatcgtagaagcctgcgccatctttagagaaaatcggcagccagttccagttggtttgcatcacatccggttcagtactaccggcaatttgcgtagttaaacgagaaagatggccgtcccaaccggtatattcggctttaacgttaatattcggatgctgcttatggaattcctccaaagcttttagcgtgacctgatggcggccattaccaccccaccaggacatacgaagattaacctcatcctgagcaaaagactggtgtgataatagtgccagagtagaagctatcagcgtgtgtaggatcgcttttttcattgggtactgctcctgttaaagagagatgtttttttctgtttttgcgtcaaagatatggcatttatccatatcaaactggaaataaacggtacggtgcagtccgttctcaataatgggacgagcttcatcagaaggcagacggcaggtcaactcgaagtcatcgactttgacgtacataaagaactcatgccccatattttctacccgcactaattcaccctgagagtgatgggtggtgaaaggcgcttgtgacatacgaataaattccggacgcacgccgaagaaaactttttctccgctgtgtgccgctacttttctttgttgggaaggatttaataccagcgtatattgacccaccgtcaggccaatttgcccctcggtttctaccagtttactcggcttaatattcatctccggcgcgccaataaaaccggcgacaaacatattgaccggatagtgatacaaattgtctggcgtatcgacctgcataatatgacccagtttcatcacgcagattctgtcacccatggtcatagcctcggtttggtcgtgtgtgacataaaccgtggtagcagctttaccgcttttctttaattgcttatgtaaatcggaaatacggatgcgcattgatgcgcgcaatttagcatcgaggttcgataacggttcatcaaataagaacacgtccggtttttttacaatggcgcgccccacggcaacgcgctgagcttgcccaccagaaagttgacgcggcagccgatccaataaatcttctaattccagaattttggctgcttcgctgacctgagtttcaatttgttcttttggtaatttgctgagcttcaggccaaaggccagattttctttcactgtcatatgtggatacagcgcgtagttctgaaacaccatggcaataccgcgagattttggtgccagattattaaccacccgatcgccaatacgcacttccccatcgctgatggtttccagaccggccaacatgcgtagagtggtggatttcgcgcagccggacggcccgacgataaccataaattcgccgtcgtggatggtcagatcgataccgtgtaccgctctgaaaccgttggaatacactttgcctaatttgttgaaaatgacttcagccatgataaatcctcttttaacctttaattccgctgctggtgacgccctgcacgaaatagcgctgagccaggaagaaaacaatgatggatggcagaatggaaatacttgccattgccaaaatctcgttccacggagcgccttccgttacatcgatagacattttcagagccagcgcaatcgggtatttatcgacgctgtagacataaatcagcgggccgataaaatcattcattgaccacataaactggaatagggcgacggagataatggccggtttaagaataggcacgactacgtaccacagcacttggaaggaattacagccgtcaatttgcgccgcttcttccatatcacgcggtacgccgcgcaagaattgaatgagcataaagacgaagaatccctgagtagcaaaagctaagggtaaatacagaggtaaataactgttcagcatgcccatttcgcgaaacattatgtattgcgggatcaacagcacggtacttggcagcaacatggtggtaatcaacgtagcgaaccagaactttttccatggaatatcgaagcgggcaaaaccgtaggcgacgatagtagaggaaataatggtcagaataactttcgggatgacgtatttgaatgtgttcagcatataatggccgaaattatattcagtaccggttttccaaccattaacaaaaccgtctttcgttgcgtgctctggccatagtcctaaagtcgtgaagatctcgttattcggtttaaatgcggcggagaacatccataataatggatacaacattaataacccgacgataattaacaccacataacggagggccgcacttattttttcttttcgcaatgtccggctgatttcttcagcggcgctttgctgtgtagctgacagattttctgattgagatcgcgggttttgttggatatcagtcattttttcctcctttatcggcggagtagaacacccaatatttcgaagatttaaaggcaatcgaagcgaataaagcaacaaccaagaataatatccaggccaatgcggcaccgtagcccatgtcgaaatatttaaatgcggtgtcataaatataaagggagaataaataagtgtagtgcgttggcccgccaccggtaataacgtaaggggcagtaaattcctggaaggcctgagtggtttgcataataaagttaaagaaaataaccggtgtaattaatggcaccgtgactttcataaacatttgccatttagaggcaccgtctatcatggcggcctcatactgagactgaggaacgttttgcaatgctgcgaggaagataaccatggcggaaccaaactgccagacgcgcagcagtgttaccgaggttaacgccaaagaaggttcgccgagccagttaaccggatcaaagccaagcacgccaataaagccgttcaataagccgtcgatggcaaatagcgcacgccacagtaccgcaatggccacactgctaccgaggattgacggaatataaaaagcggtgcgaaagaagccaatgcctcttaacttaaaatttaggacaaatgcaatgcctaaagcgaaggccagctttaatggaatcgtcaaaaatacataggcaaatgtaacgcccatggatttccaaaataaatcgtcctcagttagcatatgacgataattctctatcccattaaatacgggcggattcataaggtcatattcagtaaaactgagaaagaaagatgaaacaaaggggaatgccgtgaaaactatcaatcctattatatagggagagatataggctaaccccagcattctgttttcattcataatgcttacctattttattaaaagaaaaagctaaattgtctgactcaaaagagtcgggtaaatgaaatcgatatcgtaaattacgttattgctgccattcctttgatagtccccgtggatgtacccaccattagtcaacaataccggcacttcggctaatttattttctttggcagcaattaaggttaataacgttaaagcaataggatcatcgatgcggacatagcgatgttgtgcagactcaacaaataatccccgatggtagtgctgtttaaataatgttttccctacgcgccaggcgagattaaacaattgttgatcctggcaatgctgcgccagctctatgaatgctaaaagtaaataaggggaggctgccggtggctcaatcgctaatagggtagtgtgaaaaggtctctgttttaattcgaccaaatttaagcgtttcaaaataacgctgattaggtcgaacaactcatcgtcgttgcttaaacgccaggcgcgtaccagtggcaataaataatcaggatttaaaggacagggtttgatttcgcagccttttgaaccgtaataaccgtctctgggaagaatatagccagtcatatcctgaccgtcgatccacaaggggcgcagagtattactttttagatcataggcaaagcgatagtaatttttgagtccttcaatgacccatttttccatttctgcgtcgggatgttgacgcagaatatccaacattgccagtgggttatccactagtagcgggcgcatatcgcggaataatacattggcttctcgcgctagatagccaaattctgcgccaaactgacgcgccgcccgatcgccataccaagactgagtttggttatcatctgcggggatcggctggcgttgcaacggtgagctgaattgataggcaggtaaaccggtttcagggtgacgtgccagaacgtattgacgatataaatgttttccccaggccgcagcctgatcatcgccagtgaaggcggcatatttaaaggcggcatagatcagatcggtgccggcgttgacaaaggttaatcctttggtttcaggcaattgtggccagagcgcgggatcgacaacatcgtggcgcggatgtgcaaaaacctgtgggtctcgtattttgctgtattcaccgtggcgacctaaatccagcgttttccaatcgtcaacgtgtgcatgccaaaatccttgtatgaaattcagcgtggattcacgatcgatttctgctaaaaaatcataataaggaaggtggtgcttaagctcatgcaccaatgattttgatgctggcccttcggaactcagggtatccaagtgaaagaagtggtgcccaccccaggcaaacaggccgctggcggtatgaacgccatgctgtaagaaatagcgcgtttggatttctgctcgttgccggtactgtgggtcatgagttacctggctgagcgctgtcagggttcgcagccaattttgctggctggcaaaattcgaaataggcacccgacgaccatcagcgaattgccagcacaccggctgatgggttaccacatcgaaaccgtcggctagcagcggggtgggatgaatctggctttgaccaagagtttgcactgaatctgcatgctggcgaatcgccgtcagccactgtttgatgtctgcttcgctgcctttaatgtcgcctgcaaaatgcatcgccgtcacctcttggtggaaccaaattacagttccttataaatagaaacatcgtttcaatacattatatttggatttattggcgagtcattgagcgaatgataaaagtgtgatctaagttggaacgttgttttgatttttttaagcgatgagttttaggctgcaagtgattcaagaggtttacttttaaattaatgatatataataagaaatatacggtgttaggagtggcggtattatttcgcgcaggcgagaagctttacaataactttagtgtattgattgtaatcataatcataatcatgctttcgttgtgagacagatcgtgtccattgaatttaggcaacacaaaagcacagcgttgcgcgccgtgcctatgaagtttattcgtcagaattagcgagctaaccaaccaccatccacggcgatagtgtagccactaatataatcggaggcattggacgctaggaataccaccggccccatcaaatcactcggtaaaccccagcgagcggcagggattcgatccaaaatctctttgctacgttcttcatctttacgtaattgctgagtattgttggttgccatatacccaggggctatagcattgacgttaatattgtatttggcccattcatttgccagcaagcgggtcacgcccattacggcactttttgaggcggtataagaaggaacgcgcacgcctccctggaaagacaacattgacgctacgttgatgattttgccgccggtttcctgcttgataaattggcgggcgaccgcctgtgacataaagaacaccgttttgatatttacattcatcacatcatcccagtctttctcactgaaattgatggcgtcttcccggcgaataattccggcattattgactaagatatcgattttgccgaattcagcgaccgcttgttccagtatccccggaatacaatcaatattgctaagatcggcggtcaggctataaaaacggcggcctaatacagttattttctgaatggtttcctgaggttcaacaatattaacgccgacaatatcgcagcccgcttccgccagaccaatagccataccttggcccaaaccagtatcacagccggttaccagtgcaactttacctttcaaatcaaaggaatctaaaatcatagctgaagtctcttttcatgcggtttattgatggccgcgatagcaagatcatgaagagaaccggtatttcccagctctccaatcggtcaatattccatttggacaatttttaacgtaggtcactcaccgcgatgtggtccatatcgccaaagacctgattttcgcccaccatgccccatatgaaggtgtagcgcttagtacccacacctgagtgaatagaccagcttggcgagataacggcttgttcgttgtgaacgagcagatggcgagtttcctgcggttggcccatcatgtggaaaacggccgtttcttcatccatatcgaaatagaaatacacttccatacggcgatcgtgggtatggcacggcatggtgttccacaggttgcccggagccagtttggtcagacccattgtcagttggcaggttggcaatacgtccggcacgatatatttgttgatggtacggcggttactggtggcatcgtcacccagtgtttgcggtgcggcttctgccagcgtgatttttttgttggggtaagtggtgtgagccggtgcgctgttatagtaaaactttgccggttgagtgctatctatgctactgaactcaacgtttttcgcacctttcccgacatataaagcttcttcgttagcaatttcgtaagtctgaccgtcaaccacaatcaggcctggcccaccgatgttaatcacgcccagttcacgccgttccaggaagtagctcacgccgagctgtttccccacgtcatccccaatgctgacggtttgggtcgccggcagaactcccccgacgatgatgcggtcaatgtggctataggtcatggtgtaatcatctgcgacaaaaatcttttcaattaagaattcgcggcgcaggccagcggtatcgagttgtttggcgtggtcgctatgaatgctttgacgaacttgcatgtcagtgcctctctttcagaacagtatcttagatgggtaagcccgcaggagaaacgcagtgtgccgttgagaaagggcttctagtacgaagcttttttctttctttagccagctacgtttctggtgatgttgaggataatagttcgtgtgggatgacaattcaataaaaatggaactatgttttattatttttttgagtgatgtcatgaattttggtttttccccgcgatttacacctttggtgccagtagaatgcaaaagaattcgcgagctggccgtggtttaactgcgataggccgatttaacttcatgagggtgcaatgatgcatatgttctttatcaatgatgaaactccgtgggaagtactaggaaatgggatcaagcgaaaggtgatgacctggagcgacgaattaatgatggtttgcgttcatttcgataaaggcgcaattggtgtggcgcatcagcatgatattcatgatcaaatcgcctatgtggcggcgggaagttttgaggtagaaattgacggacaaaaacgcatcttaaaggctggagacgcctatcgggcggtaaaatatgaaatgcacggtgcggtgtctctggaagctaatagcatgctaatcgatactttttcaccgaaacgtgccgatttcctgtgacacaaaggatcgcttaggaatgctttccgaagagataaatgaagtgatggggaatgaagggggaactttcccccttaatctgccacattatcaaccagagttagcagttaaatcgggcggcgtaacgagaatatttatctgtacgatgatttaatgcgagaagcgtattgtccagaattctgccatcttcctaagcctataagcctaataaagcgttaagctgggttaagaaatgtcttcaacccgaagttcctctaacgaatccagctggatatctgccagcgcccagcgaggatcttcacgtagctctgccgcaggaatgacgatagaacgcattcgcgcagctttggtcgctatcatgccgttaaacgaatcttccaaggtcacgcattccaatgggtcaacgcccagctcagcggcggcgttcagataaacttcagggtgcggcttgctgtaaggcagatgttctgcggacatcaaacagtcaaagtatttctccaattcgaacatggctaatactttttgctgcatcaccagtggggacgctgacgcaagaccgattttcaacccctgacggcgacacaattgcagcgcgtattcaacgccgggaagtagagggcgggtttgctccaccagttcaatagagcgggcaataattcgacggcagacttccgcttcgtcggggccttgccaaggttgggttttgtaccacagcttaaccaccaaatcgatgcgtagccccagagtgttgggcaatttgtctctggacgtggtatccagccccagttcactgaatatatctaactcggcttggagccaaagcggttcggaatcaatcagtaaaccgtccatatcaaaaatagcggcttttatcggatgcagattagccatcaatcatcgctcctgtcggttggagatataagagaaacacactgtagcattgtgctgccgttacgctaaaactattgctgcgcgttgtttcgcaaaaccgcctgaaactgggtttgcagcacgcaatttgcctgtaatgataaataaattgagtttttcccataagaacatccattcgctggggattaataagctaggcttggatgacgcagatcgatgattattacggtgaaatcattgcacacctgacagaaagtacgggtaaactgtaccaataaagtgtggcactcataaggggaactcatgacgtatcaacaggctggtcaggtcgctgtggtcaaaaggattgccggctggctggtatttattccggcactactatcgacgctgatctcagtgattaattttgtctatcattacagcgaaaaaactgcgggtgtaaatgcagtaatgttggattttatccatgttatgaccgatatgatccgttttaacaccggttttttgaacatattttggtttaactcgccggtgcctagtctggatgcggggttctctggtgccaatatcatgttctttatcatctacatgctgatttttgttggtttggcactacaggcttccggcgctcggatgagtcggcaggtcaaacatattcgcgaggggattgaggatcagctgattctggagcaggcccgtggcagcgaggggcggactagagcgcaattagaagaaaaaatcgttgtgccgcgacacactattttcttgcaagtgtttaccctctacattctgccaatcattatcgctgcggtggcttattttgttattcagctactcggcgcgatggccgcgggctaactatcttgcctgaaataaacactgtgtctgaaataaacactgcgtctgaaataagcacagtgtctgaaataaaaaagcctgtatccgcgaggaacaggcttttttaacggctaatagcgatttattcagggtgtaacagttgttctaccgctttttgcgcggcaaccaaatgttgaccaccaaataggttactgcggtttaataaatagtagagctgatacagcggttgccgttcaataaaaccgcttggcagtggccaaacgctttgataaccatcataaatttgagccggaaggtcggggtagagcggtagcatggcgagatcgcattctctgtcaccccaatagcaggcgggatcaaagataacggggccattggcgctggcggcgcagttagcaggccaaagatcgccgtgtaaaagggaaggctgcggctggtggttttgtaatttcgcctgaactaaggcaatgatttcgtcaatatccccgaaaatcatgcctttctctgccgctagctgtaattgccagccaatacgttgctcggcaaaaaattgtgcccagcgccgttgccatccgttcggctggggtgtggtagacagatcgttatcgaaatcaaggccgaactgtagctgttcactccattgatgcaaatgtgccaactgctgccccagacaataggctgagtgcacatccagagatttgagtggcaaatactccagtaataggaagctgctgtcgtcgcgatcgctaccaacgccgtaaacctgcggaacacggactgttttactgcgagcgagcagggagagctgatcggcctcggcggtaaaaataggcaacatatcccgacgatcgcatttgacgaatacatctgtatgaccataactaagtcgccaagcttgatgaatatcaccgccgggcagttcggtacgctcacgcacctcggcatcgccgagttgttcgcttagtagacgattcactgcttgccacatgattcacctcctcagagctgccagttatatcattaggttaacgtctttaccgtgtaaaaaacaggagctggcgcacagggatacactcgccgaaaacctcagatcagtttcaggggtgaatctatcgagcgtcgaaaggaggaatcccgcgccgctcaagagcaacgcgggataaagtacgcgtggaacaattatagcagcttagttttaggctcaccgtcagtgctattttgtcctactttacccagaggacgggggcgtttaaccggtttaaaatggctgtatattagcgccgcaacaaagaataaagcttgaacgataacgatgcaggggccggtggctccatcaatatggaaactgatcaaggtacccaacacgcaggcgataaccgacactaacgttgccacaatcagcattttatcgaagctgcggcatagcataaatgcaatgatgcctggcgcaatcagcatggcgatcaccagaatgaccccgacggcttgcaaagaagcgacgatagtcatggctaacaggcacaacaaaccgtaatgcagcaatttaactggcaaacctattactctggcgtgattaggatcgaagcaatacagcatgaaatctttgcgtttcagcaacacgaccagcagcgttatcgacgcaatccatagggcctgtttcagttcatcctgcgtaatgcctaacatattaccgaatagtatgtggctaagatgttgatcggtatccatacgggaaaatagtacgataccaaaagcaaacatgcctgaaaaaacgatgcccatcacggtatcttctttcacccggctgttatctttcaaataaccggtggctaccgcgcaaaaaataccggaaacaaaggcgcctatggctaaaggaatgcctagccagaatgccagcacgatgccgggtaataccgcatgagaaatcgcgtctcccataagcgaccagcccttcagtaccagatagcaggacaatacggcgcacactacgccggtaacgaccgctgccagaatggcgcgctgcataaagggataggcaaaaggctcgctgagcagggtaaatagagtattcataggctatctccctgcggttttaccgtgctgttgcgctttctgtgaatgcgaaaacgcgttgccaacaggccgtgtttgggagcaaagacaaacgccaccaggaaaactaacgtttgtagcgttacaattacgccgccggttgccccatccagatagaaactgagataagccccgaaagcgctggttaacgcgccgatagcgatggcaaggattagcaagcgaccaaagcggtcagtcaggagataagcggtggcgccgggggtgacgaccatggctatcaccagaatagcgccgacagtttgtaatgccgctacggtacaggcgcttagcaaggtgaagaacagaattttcaatcgtagaggagaaatcccgatcgacatcgcatggttttcatcgaaaaacactgccagcagatctttccaaatcacgcacagaataacgaaagaaaccagaatgataatttcgacctgcaatacatcttcatcggcgataccgagaatattaccgaaaataatggattgaacgttcaccgaagttgggttgagggaaacaatcaacagcccgacggcaaagaaggtcgaaaatataaaaccaataatggcatcttcccgcagccgtgtgatgtggcgcactagcgtcatggcaagcgcggccagcataccggtaaagaatgcgccagcggcgtaaggcaggccgagagcataggctccagccacgcccggcaccaccgagtgggaaagagcgtcgcccatcagcgaccagcctttgagcatcagataggcggaaagaaaggcgcaaaccgctcccacgatggcgctgacccaaatagcctttaccatgtagttgtaattaaagggttgtaacagaatttccagcattaggttttcttctccttttgctgacgctgcgccggcgggctgtctttggtctgaccatagaatactgccggacgttcatcatcggtaatcaccgtcacggtacgcggatcgttatcatcgtgcagatcgggaccggataggttgatatggcgcaggacgccgccgaaagtgatctccagattcttttgggtgaaggtggtttcagtcggacccgcggcgagtacggtctggttgatcaaaataacgtgatcgcaaaattccggcacgctacccagattatgcgtcgatactaaaatcagatgcccttcgtcacgcagcgcccgcaatagatcgataatggcattttcggtctttacgtcgacgccggtaaaaggttcatccagcagtaaaaccgaaccttgttgtgccagcgcccgggcaaggaacacgcgtttcttttgcccgccggagagttcgccaatttgccgcgagcgcagcgcggttagtcccacgcgctcaatggctttatttacaataacccgatcctgacggttgggaattcgcaaaaaattcattttcccgtaacggcccatcattacaacgtcttccactaataccgggaaattccagtcaacttcctcggtctgcggcacgtaggcaatgatattttgtttgagtgcatgaataaccggtttcccgcttagttgaacgctgccttcagtgggtttgaccagccccataatacttttgaataaggttgatttaccgctgccgttcacgcccactaatgcgcagatagttcccccgtccagggtaaaactggcattgtggatggccgtatggccgttgttataagtcacagaaacatcatcgactatcagttcaggacgaacaaaatccgcattaatcattggccaaatccttccgcaatcgtgttcacggtggtattgatcaagtcgatataagtcggcaccgggcctgtcgcattcgacaatgagtcaacataaagcattccgccgtatttggcgtcggtttctttagcgacttgtctggcgggtttatccgaaatggtactttcgctaaacacgaccggaattttattggcgcgaacgatatcgataacccggcgaacctgctgtggagagccttgctcctcggcgttgattggccacagatacacttctttgaagccataatctttagccagatagctgaatgcaccttcactggtggccagccaacgctgacccgctgggattttgtctaaacgttcgcgtagtggggtatccagcgcgctaattttctctgcataagctttggcgttacggttataagtttccgcattagccggatcgtgtttttccagagctttacggatattatcgatataaatcagagcattggtaggagacatccatgcatgaggattaggaatgcctttataaggcccttcgcgaataggcagcggtgtaatgcctgcggtgacaacgacggatggaacgtctttcacattctcaaaaaagcggttaaaccagcgctcaagattcatcccgttccagagcactagatcggccgactgagttttgacgatatcttttggcgttggctggtaatcatgaatttcagcgcccggtttggtaatggattcgacgatagcggcgtcaccggcaacgttttgcgcaatatcctgaatgatcgtgaatgtcgttacgaccttaaacttcttttgggaggtcggattatttgtggcgaacgcggtagtactgacaaatgagaataatgccaatagcgcaaacagggtaaaacggcgtaaaaatatgttcccggtgtaagtcaaagcaggcagagaggtttttttatactgatataacattgcgatgctcccttttataaatgaaaatgattatcaatatcatttggttttaagtcaagtatcaccatacaataaagctaagtttactgatagttacgttatatcacctgattattatgtttataatcgccaaaatgtaccaaaaatatattttggcgtgatgacaagttgtatatgctacaaaacggcctaccaaagtggggaatactgtgaatccaaaactaggttgccttatggcaatattattgttggctgggtgtgctaaacagacccctccaacacagtcgaaaaatggttggttgaagcccccgcaacaggggaagttcaatccgagttccagaactgatagtggaaccgtagcttataacgaatacataaagcaggccgccagccattacggcgttgatgaaaccttgatcaaagccattattcaggttgagtccggctataaccctgaggtcgttagcacctccaatgcgatagggctgatgcagattaaagcctctaccgcggggcgcgatgcctaccgtatgaaagggcgcaacgggcaacccagttcccgcgagctgaaagacccggcggtcaatatcgatattggcaccgcctatattaatattctgcaaaaccagcagttggtcggcatcagcgatccgcagacattacgttatgccaccattgtttcttacgctaacggtgcaggcgcgatgctgagaaccttctcctcagacaaaaagctggcgctcaataaaataaaccgcctcagcccaaacgaattctatcaacatattcaaactaagcacccagcaccgcaggccccgcgttatttatggaaggtggacacggcttaccgagcgatgacggaataacagattaaatcgctaaccgatgcatcttgcaggcagtatttcatcggttagcgtttatcttcattggtcaaatgtttctgtctcatcccgcgccttaatttctgatatttacactcctttgcactttatcccttattgcattcattaatttattgctaatgcgtcacgttatcatttagtgttttcctcactgaaataataaatttgctgtgttttgccaaggagccataacgtgcgattaacgctttccctgacggcactggtatgtgcctcgctgttttctacttcatccctggcaacaacttatccggtgacgattactgatactgatgggcagaggctcactttcaagcaagagcctaagcgtattgtgatgcaagacggaagggacattctgacattggctttgctggatcgcagcgatccttttgagcggctggtggcctggaataatttgctgagaaaaagcgatggcacgacctggaatctgcttagtagcaaatggcctaaggccgaaaaaataatggatatgggatttagcgataaaggcgaagttaatctggaggccgttattgcgaaaaaaccagacttaatggtggctcagcttcgttctaagagtttattaattaaccttggggtgttagataaactcaaacagctaaacatccctgtgctttttattgataccaacctcaagccactggaaaatacacctaaaagtatcacgctgttaggtgaagttattaatcgcgaagctgaggctcagcagtatactgatttctatcaacagcattaccaaaacattatcaacaaaactcgcagcgttgagccaaaacccttggtgtttgtggaagctaaggcgggtttgggcggggtcgaatcatgctgctttactcacggacatgtaggctggggagcgctgattgaagctgtcggggcacataatatcggttcagatttattaccgggagccacaggggatgtctcgctagaaaaggtcatcgcgctgaaacctgcggcctatattgtctccggttcgcagtgggcaagtaagaataatgcggcagtacctttcggctatggggtgacacaaaatcaggtagatgttgcctttaccaaattaaaacagcgtcctgcttttgcgcaaatttcggcggttaaagaaaatcggctatacggggtttatcacaatttttacaatcacccttataacattgtagggatggagtatctggcgaaatttatctatccggtacaatttacccagctgcagccacaggatacttataacgaaattattgccaaatttactcaaattccgacagaacctgctattttgggggcgcaggcttcggcggtgaagccttaataaaataaacacatttttaaaaatagcccctgattggactgcgccttactaggttgggcactcaatttaggggctttgacgttttacatagccggatggaaagttgaagcaatttccagcacaccattaataatgaattgcacgcccatgcaaactaataagaatcccatcaagcgggaaatagcctcgatgccgcttttccctacccaacgcataatggcacctgagctcaacaagcatccccacaggataagggatacgacgaggaaggttaataccggagccacggccaatacccaaggagtaaaatcggtatggtctttcatcgtcgcggcggaactgatgatcatggcgatagtacctggcccggcggtactaggcatagccagtgggacaaaggcgatgttaacggagttacgcttctttaaatcctgtgatttggcttccaattgggtatcttcggtcgattgctgagggaacagcatacggaaaccaataaatgctacgattaatccaccggcaattcgcaatccgggtatagaaataccgaaggtgctcatcacgacctgaccggcatagaacgaaatagtcataataaagaagacgtatatcgaggccattctagactgattattccgttcctctgtggtcatattgcccgatagtcccaagagcaaggctacagtagtcaatgggttagctaagggaagcagcaacactaaccctaaaccaatggccttaaataactcaaaaatacttaacatcaatcaaactccacaaacttagtcatatccctgaaaaccaaattgggcattaccttgctattttgtctcaaataagacaaaaaatgcataagaaacccatcttgcattgatgtgctctatgagtaaaggcgcataaagaagatagggggagaagatcggtgtttggtgttgtgtgatccggatcatagctcgacagtccggtagttggttcaccgccaaaaatatcgaataatcataagattgtatcaatttcggggaagggtacttttgtgtgtatttgtgatatcagcgtcgaagatgaatatgttcgccagccactctcagcctcggcagcttgggttttggatcgccaggctgctcgttcccgtgggcgtttgcgtttcctgaaaccgaaaagagagcctcgtcctcgttggcgtctggctccattaaaagacacttatgaaatccgtttttatcctcagcgattacctgaactgtggttcttcagtgctgaaagtgcgttgcgtaaacgcttataatatatagaaatgtacgtttggacatttcaattgtctgacccaatgctccaatcaacccccaaaatgccgcctcttatggtggcgttttttacgtaattgaataaataacctttactgacgatttttctgagaaaagaaagcgctattttgccagatcctaaacggttgattgacacccgcgcctgttgaatataatttcaaatatcgagaataataattcagttggtatttgtgatgtctaacccattaacaccggtagaaaaccagttttatgcttataacgctcacgatttagctgcattttcagccaactttagtgaggattttattgcctaccgtatgccgtctttagaaccatcaattgttggtaaaatgcagctggaggccttctatcgtacccagcgttttaatcaggccgagttaagagcagagttaatttcgcggtcggttttggggaataaagtttttgattatgaaagaatctatggtttaagcgcagagccaatcgaaagcgtagctatcttcgaggtggttgaaagtttgattgtaacagcttggtttttctataaatagaatgatgaagcaatctcgccgttgatatctgcgtttcaataaaccgtagatatcacggcgtttaatgttatagttaaatggctattagttaaatacctattagttaaatgcatagataactacgattttttccctgaataaggtctaagtaactcatccaatatttccattctttcacccacagggatgtagataaaacgacaaaaccaaccttttatttccttattttttacttgtgtccgtaagaaatatcggtgaaatacttttaggtcatcttcaatgttactcatgatttattccttttactaagatattcatttaatactaaacaataaaatagggaataaacactgatgatattggttatttttgttcatgttttctaaataattgaaatacatgcatttaatttgtttctttaaaggcgtggtgcaggaggttcatttcttctgaaaacatcacacctggtattctggatgaaaatcaaaagcacgccattatctgataaccaatggcatataagcatcctattataattaaggtgaggccaatagctaaatacgataaaggaatgcaaattcccgatagttcactccataaacgtttaaacattttcacttccttgtgtaatcagaataatgatgacaaataaataaataagataaaaatcggttcttcagatcaataggccatgattgatcggtgaaagctattgtttatctcgcgtacacttaatttgttgtgataaatttagatgaataagtgaatggtaacgtttggtgatgcccttgagcgacattcaataataagtatctattaaatttaatgtttattaatgggattgaaataaatttattttccagcatcggtttaaatgagcgtgctaattttactttttatcagattgattatttgcatatagcatacttcgccatgattaggcgtgctaaaagctgtttcgttatgatatgggtaaaggtggttaggataagcgtttagtaatttgctgatagatagagcggttgcattggggaagggcgatagataagtgaatgatttggtgacaagcgacatgggtcatcaaaacgaacataccgataagtgatgagctgataaaaagcctagacgctataatattaaaacgcctcggctgcataaacagtcgaggcggcgttccagtaaccattgctacacggaaacggaaacccattatgagcagctttttctggaatagcaatatggatgatgggaagcttaagtgattaaattgcaaattttcttatatcgaagccctcccaaagagggcttgatggggtgatgaacctaggcgattaactatgatcagaaaggaggccagtagtgggtctgctcatgccagcctcttttatacatacaggcatcaataacggcattgcgagctgatgcattacgatctttctgaaccgttttaaattcaggttctttctcgtagcgatatcccttgtcacagccatctttacccttttcacaggatttgtatttatcctgataagagaattcaaaatcagtcacgatatcgggactgtgtctctcgtagccaatagccttacattccgcagaatctctttcgcggtctaactgtgtagcaccacctttttcccattgggtacaaccagaaagagcaaggatcaaaagaacaaaaagtgagttaaaatttttcatcattatgtcagcaaaagttttcggaagaatacgcgaagaatccgtttcacggttctcattcacgagtaaggaacggagagtaataaataaggcatcagtaatgcaaatgacaattgagtacgtttatcaatcgttgagttattgatgattatctgaacgattgatttaagtcgaggaaatctgtctgtcatcaccacaaaattgaatttttttgtacgtaattcaggctgattccacttcttatgataataatcgcagcctgtgtctttataaatgagactcaaattggcatcattgcgttagaaatcactttttaggatggatagttatgaagcagtttcctttcgaccaacgttatgaaatcgaaaatgcgagcggtgaacgtgaatatttcatcgaaggtgatgtatatattcgtttactagaaggatctccagtttaccgtattgatggctatgaagtttatactcatggcgataatggtgaattagtcggttttctggaaggtgaacgtattacccgtttggatggcgaagaactgttagttattttaactcaataacgctatcgccttcgactcgcttcgtatttgaaaactattggactcgcatcagataagaaatcgccacctgtatttcagagcgtaaatataggcggcgattgatagctacaggaagatgaaatgcgttagaaacggtaatttaacatagtcactaacacatcatcggtgctgatacggttagcacgagtaaattcattttctttcaacaagttaagtttgtattcaacgatcacagccatattcttgttcagatcataagttgcggcaagatcgataaacttcaccatatttttgttgtcgccaaattcgctttcgagatttttgccgcgtccctgcaaataggcgatcgatggacgtaaaccccagtcaaattgatattgcgcgacaaactctatggcctgagtctggttggcaaagccatcttttctaccgacatagtgcatatttcgcacatccgcgtacatggcggccagataaatattgttggcgtcatatttcacacctgcattccaaccgtcggcttttttaccgcgatgatccaactgttgctcatcggtacgtttcgatgcggcataagatgcgccgaaactgagaccattatccagcgtgtacactgcggataatcccataccatcgccgttttggttagctacgctacgcgggttattggtacgtggacctgtttgatcttcagtattattccaaccgtcgtttttgccttggacctgaagtccgatatctagtccatctaccaaattgaatagattgcggttacggtacgttcccacattgttggtacgataggtcataaagttatcggtattatcgtaactctgtccaccaaatacaggaataaccgcgccggtccatccattaatatcgtttaatattccgtaattacgaccgtaatcaaaagatccatattcaccgaagctcaatccggcaaaagcaatacgggtagtatctttcttagtgcccgcactttctgcctgattcattttgacgttatattcccatcgggcatagccagatagggtatcgttaattttggtgtcgccggttaaggtaaatttaactttagactggtcgccagcaaaacccttatcatcggagaaataatggcgaaccttaaaagaaccggaaagtgcaatacggttgccatctttattgtagagctctgccgcaccagcgggttgcaccatacatgccaaaggtactattactgcaaataatttcaaattgaataattgcgatttcatcttcttccctggtttttgttatacaaaattatttccgcagtaaattaaccaagcgtgatatatttttatgcgatgacgctcacagttatccttatgcaacaaatatgtacaccacaaaaatttgaagctgctcgcgttttaatctcactgactgaagataatagaactggtaagggatgaattaattcttaaaacaacggtaaggcagctaagatgaaaaacagaacaaaggcgctgagtgcattagcattaattttcagcagctattttagtattcagcacgcaatatcggcaccgtcgaccgatattttccccggggcaacgctgacccaattacagtcgcaataccctattcattgggtctctgtagagcaaatttctgcgagtttgaaagggaaagagccaattagtgtaggttttgatattgatgacactttgctctattccagcccggcgtttttctacgggaaaatgatttactcacctgatagttttgattttttaaagaatcctaaattttgggacgaagtcagtaacggatgggacaaattctctgtgccaaaaatttcaggcgcagccttgctaaacatgcacttatcgcgaggtgaccgggtgtactttatcaccggtcgaccaatgccatcttccgggaaggaaacggtgacaaaaatcttacaacaggattttaatattcctgatgaacagttaaataaagtgatatttgccgggattggcgatggagccaaagtgagccatatgaaggaaaaaaatatctcgatattctatggagattccgataatgatattgctgatgctagagctgcaggagcagaaggtattagagtgttacggccattaaattctaccaataaacctatgcctaagaatggtgattttggtgagaaggttgtcattaattctgattattagttcacgctaatattggatcgggattgacagcgactcaaggtaagtcccgtacttactgacattgtgagtgtagcaatggactgtattatgcccgttagaggcaaaacattatctttatttattatgactaatacaccagaagaaattgaacgacctattttacaactctttcagaagtatccacagaacaaatatagcgtgcaggatgtaatgaggagcctacaggaaattagccgctataaaatagaatatcggttgaaaaaactcgcaaatagaaggctgataacctgccacaaacgcaaggtgggaatcgtcattcgttactattggcaactaaacgagcgtaaggaataagctcagtggcgagtgattacgtagtaaaaatagcgattgactttgatttatcggtttgttgtttctcattttcgcagagaaaaaacgtcgcacaaacatatatgtttttagctacgtaacaaccggggcacatggttaggtataaaaatacaaacagtggaagggcgggcacttccactggcaatcattctaggctaggcaatctttcgacaaaggtatttatctttgatcacgccatcaaagaaacgccctttagacaccacagacataaaatcgttataaacccgtattggcacgttaacatactgataaatgtcattaccacagaactgtatttccaatacatgactctctgggtcatacccaattgagtgaattctcgaagatgaaaccgactgtcgctgcaagaaatagtcctcctaggtgaggtaaacgtccctgaaaaaaatacatcgtgtcttaagtgtgtgcgtcctaagtacatcatactcgctgaatcgatatgagtcataaatacatttgtgaatgtataactcattgtggctaaagctattgtatgggcttatgaattaaaaaggtaagtactttaatgcccgtggctttgacagagcgcaaccacaggaaggttgttttagtatataaccgcaaaattccagctcgacggcacttggcagctgcaaagcatcactgatatcttgggtatggtttattgaatatgcagattggtcgcgggttttgggttaaacgagggaatatatgtacaacgacaatgaaaagaaattttacgttattttaaaccgcaattgcgagactccgactctgtttaacgcggcttgccatttaaccgcaggaataacagatttgatcgaagaacgtgaatttcattcttatcccagcactatagagggaatcagcgcaaatatgagccactatcctatggtggtattacaggcaaaaaacagtagccaactgagcaacttaattttgaaatgccaggagcaaggtgttttgtataatttcttcaccacgacgatgctttcgcattcagcggaacagcaaatttctgatacggcaaacacagactttgaaaaattggattttgtcgctgtagctttatacggggatgcagagatgttgaaacccttaaccaagaaattttctgtctatcgttagttgaaagcgcagggggattatttaggaagaaatactcccccttggctgcttttggcccgcttttcagtcggcgaattgtcatttaggtaaccgctaaaacccaaggtaaactaccggctctgttgtttgaaatatcgccgaatacttaactattcttcagtattcaaggatttcagctctttactgagagaaatcgaaagtacgattcgaatcacgacaatagaagctagaatgattaattctttgtaatcgggttcaatgatcgtcttcaaaatgtctgccgggattaatatttccagtgccagcaacagataaccacccaaatccagtcgaatacgttgaatatttgattcgccgcgctgcagttcgttttttataaatgcgaataggcatttaaccacgccataaatcaaaactaaaacgctaacaatatttagcccactggctgccaacatgatgaaagtatgaatgttcattattgggttactccctgaatagtaggccgttttcccttgtcaccgcgggcgcgggaagcgtcttcagtatagccctaaatactggccgtgggtgttctcacatccagtcggctgcaatgtagattttagtggtgcagaatttgtcagatttaaaataaataagcgacgaaggtaaagcagcggtgaaggttgaaaatgcttcaccgctgagccataaacaaggctatttaatcatgattatcttagttgtgagaatctcgtagcgcttcaatcgctcgttccaaagagtcaatatcattgcctgatagcaacggtatgattttgttaatttcctgctctggcaggtcataaatttgcagtgctaaaaggcggcgaataatatcctcagaaaagcgggtctttattgcgctagctggatttcctccaacgattgtataaggggcgacatcgcgggtgactatgctgcctgaggcaataatggcactttcaccgacggtaactccgggcatgatcatagctctcatcccaatccagcagccatcgctcaatattgtgtcacctcgatgctgataagattcgctgatagattccataaagggatagaagctgaaccaatcaatgcggtgagtatggtttccacccattaaaataacggcttccgcgcctatacatacataattgccaatgatcagttggtcaatctttccgagaggttcccactgttggctaatggcatcaccgtgcagatagcgaacaaccgatttttcaaaaccttcatcccagcaatggctgtaatagctgtgcgtacctttgatgatgatattaggatttttcaccgtttggtgaagtagctctgttttcgaccaatgtttatcttgcatggtctcattcctttttcaaaaacatccgagccacgaacgtaagttagtggcagtgattacacgttcaaatcatcaccgccggttaagcaattcgaggttgtaacagtagggggatatttatcatattcaatgcctcttttaaccctgaaatgctattgctcattgccaaacaaatcaatgattcagaaccggagatttagcctttatttggctttagtgtgaatcttcctacgtcaaaatagggaattaaatgcatttaatcttaacccgctatcacaaaaacgcatgtggggcagagcgtttgagaaactaaagggcagggatatcaacattcccacttctgcgggtggataatcacatattgtgagtgttactatgttttgtcagttattgcgtcacaccatagatacaaaacgagttgtgtacatatgagtgtatatatcaggcaaggtaaagtcggatagcgcacataacaaattgaatttaaactaaattatactgttacatgtgatctgtcgtgtaagcaatccacctcattcccactcgttcatctccgtttaagtcctcgcagaaagccactaaccatcaagattctcggcactatacccgttcatgactgtttcactttgttctattccgtgcgttaatatttgtgtaccaaattgcgtaccaaatttgccggagtaatgtcgtggcgctgaatgacacgaagctaagaaaaatagtcggaaaaccctacgatggcccgactgaacttcctgacgcgaatggattatctgtccgggttagccctaaggggctagtttcgtttcagtaccgctatcgctttgctgggaaattacagcgcatgaagatcggcacctatggaactatgtcgctaaaagaagcgagggatgctgttgaagtgtgccgccagcacctcagtgaggggagagagccgtcggttcagcgcaagatggcaatgagcgaaaaaattcaggccccgagtgttagtgactgcataagcgagtggttagaaagtccccaggctaaaaagctggttaagtatgattactggataaggatgtttgacctgcatgtcacgccatatgttggaagaatgacggtcgatgagatgcagatagcacactgggaatcagtctttaagcgaatgagggaaaatggcgcaccggtgatggctggcatgatgctggtcaagatgaaacagatttttaactattcgttacggcgtaaccgaatcatccggaacgtcctgactccattgtcagtcgccgatgttggcgatccaatccgaactattgaccgattccttaacgataaggagataggactattctggcttgctgtcgattcatccaagctcgcataccagaataagctatttataaaattagttttgcttactggctgtcgcggtatagagctgcgcatggctaaaaagcaggattttgatttggatagaaagacgtgggcaatacgggaggagttatctaaaacccggcgccggttcgtgagggggctttctgacgccgcagtgaccatgctaagagaagcgtttgatatttatcctaagctgggccaggtattcccgccggcaacgattcagaccgacaggccgatgtccgcaggggttcttttatcgatggccgatcaggtaggcagggtgatgggcgtgactgattgggcaatgcatgatctgcgcagaaccgtaaagacaaaaatggcagaactcggcattgcaccgcatgtatcagaaaagatacttgggcataaaatggcgggtatgctcgcggtatatgaccaccatgattacatacgcgagcagatagaggcggcagatttgtgggcgtctaagattcaaacgtgtgtcgatgaaatcagccccatgtcctgacagaatttaatcacgtcctggtatcggaatagtgcgccacctttaggggctgacaactcctttacctcgggtgggaatggcgtattttgttgtttccattctttgcggcgatggtaaaaggtcgttctcgatatcccgccgagcatttgctggatagccgttctgtttatcagaacaggaggaacatcgatttttatatcattcattgttggcctcttatttctttgtcgatctgcctgacgaaatagctcaaccaccgcttagccgaaaacgagttaggcggtagggcggttattttttttgcgtagcgatcgaggattttcgtaacgatggggtcgtgctgagttttaggtataccggcggtggaattaatgatttctgttctgcactgccgggcaaccgatctgatggcattttcgattgttgcttccaaacattcactccttccagcagaacagccaccagtaggcgatgatgccgccgataaagagcagcacccaatcaaggtgaattattagttcgctcatattccttcagctctccccggtatcagttgaatagacttaccgcactcattgccccaagtatcccacccgtgcaactccttccttgaaaataactcgatgcgcttcacatccccataaagcatttccagccggtttcgaacttcccacggcttttcgctgtggtgaccaagcggcgagtaaactacttgcttaatactggcgttcagccgctccagcccccgcccgcgcacggcgattaacacatcttccgtgttggctctcgtgtagttaccgccattcatccgtgactggtcattcagtagggtgaggaaatcgtaaaaatcctgcacctcaccggcggccagagccttgttaatgtgctcttcggccagttggtttagctttacccaggtgaaccccttcatcgtgcgcacctggaaaccccaggattcggcgacttcctgagcctcttggttgaaatttcccgtgtaccacatggctagcacagcatccggtgctgacatcgaccagacaggcaagcgtttcagctctgctaacgtcatcgttccatagtgattatttgccgccccgttgctggccttgttgctgtactgccacggcgggtcgcaatagataagctggtagtcactcatgccgcctctcttaacgctttcagatgcggcgcattagcctggaaaactgcctcggcgaaaccacgaggtgtagcgcttcgcaaattagccctattctcactcggagccattttatgaatacggtcatctggaacccctacaccaaccgccttgaattcatttggcatgacaaatcccccaccagtccataggcatgttttctttgtataattgtcatcaggctcgtaaccagtaaattgatgagggtgaaagaagaaatcaggttttcgccagaaagagcttatttggcttactgggttttcaatcatgtatggaacacgaagcatttcgctaatgacatgacactgccaaacaacttgcattgctttaaactgaaatgctgggtcaatcgttctttttgaatcaaaccatctcgcaccgcttacagctaaatcagtgcacggtggaaatgcggctacaaataccgggttatgtattgagcgcaataaatcccatacgatcggggtatcaattacattcccaactcgggttattgatttggaagtgctaatcccgctggggtgctgtgggtcaattaagattgcatcatacccagctgctatccacggggaagccataatcccggttaggtcgcacaggcaaataatcacgcctttattcatgccgcattccttttccgccgttcgtcaatctcatggtcatcccggcagtcagcatcacagaacaacccgcgagtaattgcccggcggcactcataaaagtggcagcgcccggtgaatgtcatttttggctttggccggttggctattgcggtgtcgatgttgtgctgttcgagagctgaagcgttatcgatatcgtcgggcattaggccacctctgcaatttggtatgggatcatgctaatcagcacgtatcccggctttatatcgccgatgtcggcaacgtgtgttatttggcgattaacgaagcttccggtgtagttaccggcgtcgaattcacgcagcgttagcgtgtcacccacctggtaattacggtcattgagccttatctcggcagtcttaattccctggtatacaggcgcaaagaattccggtctgattttcagtccgtgagttttcataggggatactccagatttggtgaaatccgtttccgtgagtccgtaatttatggggtattaattggatgttttaatttgggtgttaattgaatggatgtgttctaaaaccgcattatctacctggtcgtctgttactaaaggtgaccacctagctatgtaatattcctccgatcctatgctgtattcttctacaggcataaattgatgtttaactttttcatcttttctcgtgtggttaactccgatcagaacagttcctctaggcgctgtaatgatatcggttttgccatctggttttattattacgactttacattaggcatatatcctcctttgtcaggagaattatagacccgctatcggcgtacttcgccacagatcagcactaccgccgggcggcgttctttaatcagtgcggacacgttctggcattctgtctgggtagggtagatgttttctgaaactggcagcgcttcgcaggcgtcaaggccgcaggaactgacaagtaggacaaagccgattagcatatttcctcaccttctaaccgtgtattcaatgccacgcaaggctagcgccgccatggttttttcgagtgatatcatggggccatagtcatcataattcgctggcgctggaagtgttactgaatctgctggcttggccgctgtgaataacaaggtacctaccggcgcgtcattaatccaaccgagggttttattgccgttacagctaatgacttggcctataggtttctgctgtttcagctctgcaagttgctcacgcagtgatagcagttcttctaatgcctccgcatcattgagtgccacctgactatgttcaactgacgaccatttcatttcgctagctatttttcgaatttctgcaattcgtttttccagctgttctttactcagcatctgcattcccctctaccgtgaaaccggctgcctctatcgcatcaaatgtttttgaccaactgataacattacatcttgatgattttaaatatattttctttggcaatacaaccggcttgcttagcttctcgtttgccgctgataacgctgcttcacttgcaatcaattcgatgcgaaacttctcgctcacgatgtagtgaagattgcgatcacgctgagccgcttccagctgggctatcagtgcgtctaaatctggcattggtacggttaactggtcagatccgtatgacttggctatttcaaacttacttttaaggcgagcaattctcaattcttcgatattcctatccatcatgcctcctgcttgcgacgtgagcctttgtattcaggctttggctcatgctgtggtttgcagattgtgtgttttaaaatctcaatccaattttttctagaattaatcacccatcccccgccttcagtatcgaaaaaattttcatccacagggacggcaagacgctccagcaattcacacggaacggcaatagtgtcgcatcctgagttgtaatatctgatttaagataaaatcttgtcctcttcataacgcccagcagactctattttccctctatatccagcgttgttttccgcccacaaaagtatgtagcggctatggcgcatagtgtgatttacgctgatgacaaaatattccttcgccatatcagtcacctcaaaacgaatcgataatcagataagcaatacccgcacaacagatagcgagtatcaccgacaatattaaaagccactcggatggagtgactcggtattggagtgccttgttaatggcttctcgaatttttgacacaactattcctcagcagacygrctgccggttaagtggaggggtaagggatttaagccaccagtccgttagcagcgactgatagcttcaagcatgagttgaaccgctccgcaatcaattgcgctttaaatgggttccgttcaatgcggttcttcggggtaatccatccatgatgtattcgggrataaggtagcgtcaccgcgcctaccgtgatgtttccatgcggattatccatatatctgttaccccacggattcttccatctcagcttttctgatgctgtaaatgtcgatcgccttttccagctggtcggggtggctagcgaggacacgctggctgtatttgaagaatttctccagatctgcaactgactttgcgttgctggctgcgttggtgaagtcagcaagcagggcatcaggtgagcgctcatctacttttgtcgtctccagttcgccctcgattggctccgctttcttggtgttgatcatcttgttcaggtcggcattggtgcgcggggttacatctcgctcaggctttggttttccgtccaattcatcagtggagtaaacgccgagaataacctcggggcagtagaggcgagaccagcgcttaacggctagataggccaattgttgcttagggtcgcttgcccacagggtggagtttctcacctgagcctgagacagaagaagctcaagaacgcgcggttcatcctcccccttcatcgtcgcccacactcgaatccctaagcctttctcgtctgccagagtccagtctggtgctatgtatttattgccgttctttgaaactttttctgcgaacttgccgatcacgttttcccatgggccaaaccattcataatgaatccggtcttttgtaggtgccattgcgtaaattaccgcgttgaccagttgcgcctcataccccagcgttccgctgacgacgtgggttttctgggcaacaacaaacgggttcataccccattgaacggcttgcattgcaacagccatgcaatcagctttgttaccggcaagatgcgatgggattgttgaccggccacttgccattagcgttgcaaaattttggatggccatcagattttgagggctaaaaatagccacgttcgcattggtgatagctggctcattgctgagttcgatgttggcgatgtcagtcattgttctttttccttgcccatgccgggcggtaaatggtttctacaccgccccattcgttggtgagtcggcattcgtgataggtttgcaggttctttctgtaaaggtcatgcccagcggctacatcgtcagcatcgagctgaaatacgcgggtggggtatcgaccacagttaatggtttcgcttactgcgataaacagaaatgtcgggtattcgttgaagtgattgagatagccgtcccggtacatagcgtcctgcacgtgataccggaactcttcgatgtgtcgcgagaagcgatccatgtcagccacttttttcacatccactatgattggctgactggtgagaaacttgtccggtcggatccggcatagttctgatgtttcttcatccgtccaatagattgaagattcgcagtatccttctgcttctaaaaagtatctggccgccgggtgggccattgcactcccttgcatcagttccagcttccggtgctgttcaaagtccattacggtcttccctgactcttcgcactctttcagaaagtccttttctgctgccttaccatccgttgtgcgccggttaaactctggcgctttgatgaatcgcttatcgaactcatcaggttcaagtagcaggcagtggagtgctgtccccatatccagcgcctttagcttttccgtatctacaggcgctgttttcttccatgtaagtattgcggggttaatagccacatcatccagttgcgacttacttacccccggacccgagtgataatcctcgtttgatatatcttgatagtggcccggttccatcatgccgcctcatcatgctcagccagtcgccgctgtattcccagcgcctgttgccatttggcattctcaaataggacgttgtagagtgcggtgtcgagcccctcgaagtcgtactcatcaactaaaatattgaaagcttcacggtcgaattcagggaggtgttcaaaggttttaattaggttatgaacccgcagtgccttttcctgcctctctgcgacttgtccagcttgttctaaatcttgctcgttcaatgagctataaagcttccttgcttcggtaatgtcggtaggtgtcatagcggattacctttctgttgaaatatgctgagaaaccagcggatccacggattggtgttttttacttttggctgatgttggcaatagcgacccatgacggcatcgccagttagtacgaattggtacatgagtggctcctgaaatttaagtttgattagtaagtgatacgaactgaggaaatgaggttcttagcgatagcggctacacatttctgtgcgcaatcttctggcaatccgtttgcaattaagtcggctactgcttggcggttgatggtgcgacggtgttcaacgtcagccgcgcgcttggctgcttcatcagcaacacgtttctcttcagctaaccgggcatcttctttctgcttggcttcacgttgaactcgctcagcttcctgctgtgctttaagtttctcggctgcgatagcttcctgcttctcgcgctcgacgcgttcagctaattccttggcatcacgctcagctttggctgcggcatccttggcggcctgttctgctcgttcctgagctagttttgcatcacgttcacgttgttccgctgcttcaatgtcacgcttggctttctcttcagcttcacgcttcgatttctctgctgcctgttgagcaatgaattcttcatgtgctttccgcaggcgctcaacttcatcagctttcgctttggcgtcacggtcgaaagcgtcattcatcagcagggccatctcatggtcagactctttcttggctgcccgttctgctgtaatgctggcgtccatttcatgggcttcctgccacatggccgagtaagcttcttcggctgcgacacgttcctgttcggcctcccaatcagtaaccggctttcggattgctactgcaatattatccagttcgtcacgaaacttttttctgttggcatctatcagagcaggccgtgcttttagctcagcaactaactctttggcgcgaacctcaaatgctgctttagatttacgcactttgtcagccatcgtgtataaacgccgcgaccctttgccgtattcaggtcgccaaccactgaaccggctgtcttgcgaacgttatcaatcagctcatcaatgaatttgtcattcagtaacgcaacttccaaatctactttttcagctggcaaggtgacgagcgccagttcctttttttcatcactcatgctcatttccttataagtttgcttcgtaaaaagacttaatggcggattcgaactttttgaagtcaaatgacccagcgtcaccagccgaatcggattcaatccaaattattccgtctgcataatttgatattgtgaagtcgccgattttcaccgctttggactttccgctatcaactgaggggtttgtgtctgtgttggtaaataaaatacccatgctcatttccttgtgtttagcccacagcaaaacaccgacgatgatgtcagttatttactctggggattggtggggggggttattctggtatagattcagggactgttggcttttcaaactctccccatgctagcagaacacgctcaggtagtttgtcagtccaattgctagttgtttggtatttgccatcagcgcctaacttgaactcttcgaaatacattcgaccttcatctgggtactgagcgtagtagccagtgaatccaataaactcgccatcttcgttagtccagtcatctaagccgctaggggtgccaggtggaaaatcaccattctcttcaaaagaaagcagttcttcatgggttgcttcggcgttcaaataattcaactcaactactcggcgattaacctcttttaatgttgctattcgctctgcttttccatctataccaaggccgccatatttaatttcatactggtagatatcaacaacggcccatatttttatatcgcctccacgctttacaactggaagttcagatggatttttccaaattacctctttcatatctcacctatttagttggaggggttattccgcttctacaaactcgccattctcattcagcgaataccaaacatccggcttaattccgttctcgcctactttactggcacggatatgaattagttcgccttcgccatttcggtagcacaggacgattgcgccgctttctgacgctttagcctttccaccatcaccgaatgaagccgctacagattgcgatccagacacctctgccgctgaccagtcgccagtgttggttgccgctgaccggttgccagtgttggttgccgctgactggtagccagtgttggttgccgctgaccggtagccagtgttggttgccgctgaccagttgccagtgttggttgccgctgactggtagccagtgttggttgccgctgaccagttgccagtgttggttgccgctgaccggtagccagtgttggttgccgctgaccggtcgccagtgttggttgccgctgactggtagccagtgttggttgccgctgaccggtagccagtgttggttgccgctgaccagtagccagtgttgattgccgctgactggttgccagtgttggttgccgctgaccggtcgccagtgttggttgccgctgactggtagccagtgttggttgccgctgaccagtcgccagtgttggttgccgctgactggtagccagtgttggttgccgctgaccagttgccagtgttggttgccgctgactggtttccggtcatgatctgctgttcaagcgacttatcaactttgctccagatccaatcaatcccgcgctgaataaactgagggagggttagttcttctgtgatggttatgctggcgcttgcgatttttgtatcgccatcatcttcgcggtcaataacaccaaatgattcagttactgcataccggctatttgttggcgggtaatatccgaaaacatcaaatgggcattcacaagcgtggaagccagagccgcatgcctcgaccttgccctcatgcgtatacgttttgccaatttcgaactggtagccacggcactgaagattttggtcgaagcctttaaaggtaataactgtttctttgctcatgctgcttccttgaatttttggaataaaaaagccgcattaagcagctcgttgtttgtttcagtggtcttattgctgccaccggttaagtggcaggggtaagatcactggggttccgagatgaaatctaatacttcctgtaaatcaccgtcacacagagctacatatccatccgcatgcattcgctgaagccattcaatgcttatgtttcgatattgactcatcattcattcctcatttaccagccaataaaaaaggccgcgttatgcagccttgaatcctgtaacctcaatccgacatatcggataggtataaagcttgttgtcctgaacaatcttctgcgcagcttccatgctgtcagcgctgtcacagaacttaatgttctcgtaatacgcgccgtcgtcgttatccggcttgccagccagaacagtgaaagaaagtgtcattctcttaccccttaactatgtggtgggcttctttgcggttggtgcgatgaccaataaatagttgcctgaactatctttaaccacgtcaggcggcggtggttctgctatacccctacagcaagaaatcgaataaactgtaatcacccctacagttagagaattattcaaatggacgttttttctagtttgactgcagcaaagcaagcttttgatttattgaagataataaaagaaagtcgtgatgaattagttatcaggaaagcagcaggtgatctttcagaaaaaattactgagttacagatgcttaatgcggaactctctggcctttatcaggctgagcgatacatcacaggacagcttcgcgaagaaaataacaaaatcgagatgtttattgtgcaggccgagaactacgaacttcacaaaacggaaggtggatctgtcgtgtacagatctaagtcttcttccgatgacgttattgagcctcatgacctttgtgcacactgcttcggcgatcaccagatatctatacttcagcctagcattcaaacagttaagtccaataatttctttgttcatcagtgcccccgatgccaaaatgaataccgcatgaataaagtaccaccgctccctgatgtacatatcccacacagcatgaagcgctactaaaatcactaccgcgccgtaacgctctcactcttacggaagcctgctgcaaacttagccacttcaggcaaacatatattgtccgcgcttggctgctcggcgctgcgaaccggtacaggaatcgttgctttgtatacccgagctgtgcagcctgtgagggctgtagcgatgttcttttctaaccgaccctctgctgcacatttagctctgtaacgagctgtgcgtcgctctctcgaattcatgattacctccggtgattggctttggtggtgccggtagttaccggatttccttgatgcttctaacagctatcgatttggcatcacgttcgcattgcgatccggtttgcttattcacaaggccgttgtcttaccagcaccgccaaagccaacttctctttggtgccctcgtatcagggcaatctaattgttaaagagcgtgcttcctgtcgtaccacttcggcgtcctgccgtgttgatgggataaataatcacagattgtgttttgatcgtcaacacgaattgtgtttaattggggcgcttaagtgtgatgttattgatttttaatgtaatttaatttgaaaataattcagacgtgacccttcgcacctggatatcaggcgtgaaaagtgtgaggtgagtagtgtttaaagcgggcagggtggtgagattgtcagattacaggcgcaaaaaacccggcagcggggccgggtttctaagcgacagcattttacttgatataatattttgacaaaaccgcaatcaaaacagctacaacaagagatccaataattttccaagtttgattattaagttctttatgtaactcagttttcactgattggatgtcttcttttgaagctagtttatctttgatgatggccacgtcagttacgagagtggcgactttggtttctaaatcttttactctttcaagcatgtcatcacctcctccattcccgctaccatgttgacgattatcgcccatatcctgatcatctgcaatgacaggggctctggttatgatgttgaccgcttcaaccatcagcgcgctccctgcgttttagatacaaaaaaataacactcagctgaatgcaatattttctcattttctatttggtctggggaggaatatatggaacaaaccaccttatgcgcgccttcatttttaacattcaatccaagaagagccatgctttctatgctcacataatcgtcagctgaaggggatgcggcaactaacggttcagccgataacttgtctttggtgtcattcataatactaatgtcttcatggaggacatctacaacaattttatatgttttataggatcttatgaataacccaaaaattattccaagattaattcttcctggaatatttgagactttaatccaaggttctggttgcctaaccaccctggctggatcaccctctctgatttcgtgggtgtaaataaatgatattttttccataaccagacctttatttatatttgctaaatctctatgggctagcagtgggtttacctaagcctcattatttttctgagtgcttttactgactcaattccgtcacgatagatagcgcttatatcatcatgctgttcaggccgttttatcctgtccctgcattgataatatctatcccacacagctttcaattctttgctctttttgttagttactctacgggatagcatttctatgttttggtaaggcagcgggtcgacgcttagcgaatcattgccctcccatatgctttgtatcaactccaattcggctaaaatcggttccgcaatagcattccattctttgcgattatcgttcctcacggcagccttgtagccaaaatagtatgttgcaggtaatgcaacgactgatataattattgcaatagttgcaaccgcatcactgtatgtcatggagatatccctatgtctttctcaggttccgatattcttgccactgtcgcattaattgcttcggttactaacctaacggtcgtcttgtttatgtgctggcgtgcccgaaattggtagggctagcagtgggttagggtattagactaaccgcattttggtttcgacagctacgccaatgattttgcaattcccattaatcggcacaagaggccatgcggggttaagaccacgcaaatatttagctccgccgtcaatgatcagttttttaaatgtagcttcgttagctgtttccagcttcgcaataactagactgccgtttcttgcttctcttccagtatcgaaaagaacgagtgtatcttcaggaatgctaagcccagtaggggctgtcatcgagtcaccctcaacacgcaaccaaaagccattaccttcaattctcgcgtctgactgaaaccactcatcgatatcttttagtgcgtagggttcaatagcttcgcaccatgccccggcactaacccaactgattagtggatatttctcccccttgatattagggccaacgtaagaaaaatttgatggctcctgatcgccaaaaagaatttgagatgccgaaacccccaaaaccttagcgattgtttctgcatcgctagtgcttaattttctagcgccagattcataattcccaattcttgactgtgatttccatccgcacaggcttgccaaggccccttgggtaaggcctttattttctctaaggcttttcagcctttttgcaatttcatcattcgtattcatgcacatctatttaccacaatccgtgttaattggctttcacgatttgtgttgaaattaaaacacaaaacgtgtttaattgaggttgagtgaatcattaaggaaaaccaaatgaatcaaattgccacagtacggaaaaaacttggcgtcactcagtcagttcttgcaaacacctgcggttggaaacagtcacgagttgccaactatgaatcaggtatccgagttcctgatcttgagtcatgtcgtcgaatagtaatggcgcttaatgagttgggaagcaacgacacattagatgaaattttcccgccaaaagctgcatagaaacaccgctctttacacaacttaaccgccctgactcgagggcaccaacaaagtggtcaatcccacggactgactacgcacttaatcagaaagggaagtattacgcatggaacgtgcaagcacacgcaacaaggctcgaatcattgagagccaactactgaacaagattgcattacgaggcgtcactgatattgctgacgctgttggcgttgataagtcacagatatcacgctggaaagaaagcttcattccgaagatatcaatgcttctggctgttttggagtggggagtggtcgatgacgagatggcaaggctggctaagtcagtggcgttgctgctcgcaaaacaaaaatccccggcggccaccagggattcagcagagcagataacaatgtcgttttaactggacaaaacaacaggagtaattatgcgaaagaaaaaaccaaatagcaatacgtcagacgctactcaatatcaacgggcggcaaagcctgatgagcttctcatggtctgcaatgacaaccacgtttttggccgcaagtttgcagagatattccgcggcatagaagcgagaagagggaaggccaatgagtaacgtcttagcgtttcgtcaaccagacacagcaaggccggaggcaaccggtaaggggtttgccttgatgcatagaaaaataatggaactgcccttctacaggacggattctgaggcagttcacctgtggatacatttcatacttaccgctaatcacgcaccggcaatagttaatactgagctgggtgatgtcatggttcgtcgtggagagtttatgactggcagaaataagctggaactggcaaccggtattaccggtaaccgcattaaatatctcatcggtaagtttgaaaaacttgggatgatcaccaagtcaaccaccaagaaattctcattaatttacgtcacaaaatacgacgaatatcagccaaatttagtgccaacagattaccaacaaagtgccaacgcaaagccgcttacgccaagcgctggcgcggaggttgtgccaacagattaccaacaaagtgccacaaacaatgaaataactaataactctattactaacgtaatagagagtccctcttcagccgataaaccggaaaagaaaaaaccgtcattcagttgtgaagatgtggtcaatgcttatcacgacattctgccagaagccaaaggcataagagcactcagtgacaagcgacgcaacctgatcaaaaccttctgggtgaaagccagcaagataactcgccaactggacagccagccattcacgctggaaagctggaaagcctacctgacttacatttccaccaattgccgctggatgctggaagaccgccctgatactcgctccggaaagacgtggcagaaaaaagggttggagtatttcctgaacgatgaaacttatcttcaagtccgagagggggccaaggatgaccgttgattacaaaacaccaccacacaacctcgacgcagaacagagtgttcttggcggcctgatgctggatgacggcagtgataacgttgctaaagtcctgtccatgctgaaacccgaatcgttttacacccgcccgcaccaagttattttttctgaaattaaagacttggttagcaggcagatccctattgaccttctgacactattcaaccagatggagaacaaggggattagcagcactgtaggtggttttgcttacatggcagagctatcgaagaacacccccagcgccgcgaatatcgtgcattacgcgatggaagtacgcgataaggcgatcactcgttacagcattgccaaaacaaatgcgatgaccgagttgctttatgccaacaacggtatgacggcgacccaaaagcttgaggcgatacaggcgctatctaccgagatcacagatcacgccaagacaggtaaccgcagaggactgcgaacattcgagagtgtgttctcagattgggttgatgttgtcgaacaacgactttccggtgacccgcgagctgttgggttaaccagcgggatcgcatcactggacgccatgctggaacctaagcgaattgtgaaagggtcactgttcgtggttggtgcccgccccaaaatgggtaagacaacgctctattcaaacatggctatcaactgcgcactgaatgagaatctcccggcgctggcgtttagccttgaaatgcctgatgtgcagcttggcgaaggcatgatttcccaagcctcaggagtatccagcagtaatttttatcttgatgggtacgacgataaccgttttgcgttggcgtctgcgaaagggttagagctggcgagaagtggcaatctgtacatcgacgatacgccgggactttcactgtctcacatcgtttctgagtgccgccgcatcaagcgcgaacgtggtgttgtaggcatggtattagttgactacctcacactgatgtcagccgaaaaagcagaccgtaatgatctggcttacgggatgatcaccaaggggctaaagaacctcgccaaagaacttgattgcgttgtcgttctgctgactcagctaaaccgtgatttagaaaggcgcgtcaataagcggcctcaaccaagcgactcccgcgacacaggacagattgagcaagactgtgattactggctgggaatataccgcgaaggtgcttacgacgaaaacgccaatcagcaggacaccgaattactactccggcttaaccggcacggcagcggcggggtggtattcgtcgagcaacgtcatggcgcaatctatgactgcaaccaggatcaggctaaagcaaaggcggctgaatctgagcgccggtcaactaaaaaacaaggtggtttctaatggaactgactcgcgaagatgaattaaccattgagcaatatattcgccttgctcacaacggctacaccggcccggtatttatctggcttgaccggctgaaggagcttcacatgaaacgcgcacaactgattgcctggactgctatcacctgcgccagatacgaatcgaagagggctgcatgatggacataactaaatcgcgggaagagtttgaagcttggcttaaatcgaaaatcccaacgacttaccgccttgcatttgagtgtggcgacgatggcgagttaaccaacttagctaaagcgtcagtgttagatatgcggacagcgtggcaagcgtcgcgagaaagcattgaggtggagtttccagaccagcgagatgaaaacttcgacactgataccgcctacaacgaagggttgagtgccaccgccaacgccctccgaactgctggcattcgaatcaagggagagagtgaatgaaaacaacggaagccgtaatgtgcgtagcatgcagatatcaccacttgaagctagagagggttgtcatgagtgatgagtcttctggcaccaaaagaaaatgctgcccaaagtgtggctgtggcgggtttattaacgttgaggtaaagccatgaaagaattagatagatttacatctgagagactagaaagcctttgcgattatcgaccaaacagagtcactaatctgattaatttcagggaaatcgcagcactagcccgcatcgcgttagctgcaaagagggctgagcctgttggttatttagagcaaaaccatttggattatcttcgatccggttctgatgctgatatttggcctgagggcggtgcaggtgatatccctgtctatctcgccccacagttgaactctccggtaattccggaaggttggaaactattaccgaaagaggcaactttagccatgctcacgctattgggattaacaggcagctttgaaagtatgcaagagcgctatgccaatatgctagccgccgcaccggagaagccactatgacaaagcatacctatctactccgaaatacccaggtacgtgacaacgccatagcagcgatccgcagtgtgccgcttgatgagaaaaagccgattgaggttctcattcaggagaagaaacgcagcaatgaccagaatcggaaaatgtggccacttttgcacgacctatcaaaacaggttctctggttcggtgagaagtacgatgaagctgactggaaagacctgattactgcgatggtggctaaggccaaaaatcaggatcagcgtacggctcctggaatcggcggcggggtggtgatgttcggccagcgtactagcaagatgcgagtgagtgagatggtggaggttatcgaggctatctactggttcggcactgagcagggcgtgatattcagcgatgcatccaagctggaaatcgagtgggctaaccggtggggaaatacaccatgcgacaaaggcaaagcagcatagttttcgccctagacaatcttatcttccgcaagacatcccgaaccaaacctaaacccccaatccccgccagcgaaatacccacatatgacgctatctatccgttattagctaaacgctggctaagactcaggagtagaaagaatgcctgatatttaccaaaagattaacggggccgattaccgacgaatatttgtcgttggtgatatccacggctgcctgaataagctcgatgagaaattactctcagtagatttcgatgagagcaaagacttgctgatatccgtaggcgacctgattgaccgaggttcacagaacgtcgaatgcctcgacctgataacgcagccttggtttcgtgcggttcgtggcaatcatgagcaaatggcgattgatgcactggatggaaaatatggaatggctgaatgctgggtagctaacggcggaatgtggtttttctgtctcgaccccgaccaaaaactattggcaaccagcttaattaatcaggccgctgcgctgccgctggtgatcgaagtgacaactgacagcggtaaatatgtagtggcccacgccgactaccctggcaatgaatattattacggaaagccggttagtgaggagcttgttatttggaatcgggatcgcgtgggtgacgctatggatggtttaggtgcagaaataactggggcaaagcagtttatcttcggccatacgccaatgagtaaacccagccaatttaaaaaccaattctatatcgacactggtgcggtatttgggcgtgagttaacagttatccagattcaaggggagcaggcatgactcagttaccgcaatccgtatgcgtgtattgcttcttgatgcttaacaagggtgaaacctacgcccaaaaagaagcggctaagcgagatgtcggcactgggattaatcagataccggatatgtggagttttaccagctcaatgacctcaacaggctggatgaagcgacccgatggtttaattgaacaatggggagaatcatccttttccagatcaaatgaccagtttttttatgctgacgcttttttcccaatagcgttccccaataaagttttaaatatgagtgtgacactccacggcatcaccgatatttcgataataggaaaaacgctcgctgcggatatgttagcaagaacatgggcagcgatcccactgagcaagaaaagcggggaaaacatccctacagcgcaaagagttatgtggcgcgttattggttattaagtgaggtttaaatgaattatttctacagcccagcgaataatgccgcttatccagaatcgttaaaaacggaatatcaggctgcgcaaagttggccggaggatgccgttaaaataacggacgagacttatcagacgttttttgcctgtgcttcgccagccggtaaaaccagaatagccggaaagcaaggccagccagtttgggaggatattcccgtttatgtccctaccgatgatgaattggccgcccgtgctcgccgctatcgcgatgctttcattcaagccaccgatcccatgatggtcagtgattattctattgacgacgtaccgctgacggaagagcagcgcagcgagctaatcgccactcgtttagcgttcaaacagtggccgacgctggcgagctggccgctgattgagttgccagtgattgccgggctggataaatcccgctggctactgacggaagcggtgaataatggctacgtggtgccggtgtggccgccagaatttcgttaaatctttataggccgcatcgttcgtggcctataaaaaatcactcaggctttagtggccactcgatatttggcgcagttgaaacgtcaacacgcatcagcaaaactcgatattttctccactctgtgaggtcagccttttctttttctgtcgcatctcccatatcaacagcatcctgccgccaggcaatttcagaatcagccgcctcccttaatgccttttttttctggacagcgcgatatatcaattcttcaggtgaaggcggtggtatatcaacccatactggccgtccatttaatgaccctatggtcttcctatctggtggagtagttttccagtattcattagattcctcatcagaaagtaaaacagcatcacttggccaggttttcttgttatatgtaccatcatctttccatgctgcaggtatgaatccatttaaattagcgctgtaatataccattgcatttccctcaatatccgatagcaaaaacaagtggattagctgttccaggaactgacccagaaccaaatacttgtgagaatagggtaatagaatttaagttggttgatgtcacttgaaacatttggtcgcatgaccccgtaccattccccagagtggacacgctggagaacacgcaagcagttgggaatgctatagggaacgagagtggacccatggtgctctcaccagtagaggatgggccagcaaaccattgaatgatcaatccaccaggaacatcaggtatgcgaatataatctctggtggttactgttttcggctgttgtgctgagatttgtttccattctgaccatgggcccgccccattccactcagcggtcagaccacggacaaacttcagtcctgagtacgtcgtatactcttgctggcatccataagctgattgcgtgacaagcagtgttccacttgtatttgccgggtagtgcctaccaggagttgcttgagaatcgacggattgataccaaacacccacgcttgacgtaatattaccaaaaccatttaaatctgaagtacccaaagaccctttaatagggaatccactaagatttgacagcgccaaagatggatttgcaatatccgagagattactgattttggcaagaccaccaatatttgtcagggacaaagatggatttgtaacatcagagagattactgattttagcaagagaaccaatgtcattggaggttggtttgttattgggcccgtaaaactcaacccatgatgcccatggccctgatccagtccatgcactagataatccacgaacaaatttacgaccagagtaggctgtatactcttgctggcatccataagctgattgcgtgacaagcagtgttccagatgattgaatcggataattcgccgccgaggttgccaatatgtcggtgggttggtaccacacacccgcagaggttgccctatcacccagcgcatttaaattaattgtcccaagatctcctttagatgcaaacccaccaatatttgatagggactttgaggcattagtaacatcagaaaggttggcgcttttcttcagggcatcagcagcggcggcaatgacttcgccccggcgagctattccctacacaacagcacccgaccaaatgccggggaagattttccccaaacggggggtgggtcatgaaaatgttgaaatcaccggatgtatggatgctcatcattgcctggatagcagaccaccggggtgagttacttagcgcggcactggctgcgttgatggcttacttgcgtggctggtatgccggaggaggtaaaacgcaacgtatgcttgatgcggccatgtgctcagtgatggcatggtttatcaaagatgtattggttatagccgggctgaaccctgactggtcattaattgccagcgtgttcattgggtacatgggtacggattacattggttcggtgctaaagcgcatcgttggcaataagacaggggctgacaatgcaaatcagtagcaccggaatcaatctaataaaacaattcgaaggctgcaaattgacggcatatccagaccctggcaccggcggcgctccctggacaattggttacggctggactcatccagtagatggtaagcccgtggttcgcggcatgactatcgatcagcctaccgccgaccggttgctgaaatgcggagttgtccagttcgagcagggcgttaaccagatgctcaaaatcggcgtaacccagaatcaattcgacgccttggtatcgctggcctacaacatcggaacccgagcgctcagcacatcgacgctgatgaaaaaggtaaacgcgggtgatgcaaagggcgctgcggatgaattcctgaaatggaataaagcaggtgggaaagaaatgaaaggcctgactaatcgccgggcggctgagcgtgagcttttcctgtcatgagtcgcgtaacggcaatactcatcgctgtaacggtggctctgctattcggcctgatgtattaccacgggcaagtaaccaggctacagcgcgacgtctctgacattacccagatagccaacagcagacagtcagccattgacacgatgctaattcagcgccagcaggttgctgctatcgatatcaaatacaccaaggaactggcagatgccaaatctgagaacgagcgccttcgtgctgatatcgctactggtgctaagcggttgcagctcaacgccagctgtaagcgattgcccgaagccacagccacctccagcagcgttgatgatgccagcgccagacttactaacgccgctgaacgggattatctcagtctccgcgagcgaatcggaattgcaaccagccaaataaacggcttgcaggcgtatatcaataacgtttgtcttgcgaggtaagagaaggtggggacagcatccccgctgaattaatcacccaactttgcggtaagggtagccagcttttttgatatgcgcatcaaaatactgccccttagacggtgcgttcattaatgacgtgtgaatggaggccgggactctcgaatattgataaataccgcctcctagaaaagcaatttccaaagtggaacttgcactatcgtaaccaactgaatgaaggtttgaagatgaaacaggttgacgaatcaattgataaatctcctttaagtggcaaaagtgccaaagagatgatcgaacactttaagaaatataacttcgtggatgatcacggacacaggctagacatgtgcttggacttcacagatttgattgaaatggccgtttcgtaggcttgttaggcaaaaaaacacaaaaggctcgacttaggtcgggctttttttatgcagtaaatccagcgcatcgcagcgcaaatcactcagaacctttcaggatgacccttgaggaaccggctggctgtcggagccttctgagggccgtattcctgtgcgaacaaggttcatcactaaaaggtatatccgaatgaacattatccctcttagctataaaggcgaatcagtacgctttaacactgaaggttgggtaaacgtcactgacgttgctgagaaatttggtaagcgcatcgacaactggatgaggctgatttgaaacgcttgaatacatccgggcgctggatgaggcaatgactggtgtggagtctgaaattctacatccctcgaaatgcaggtatgtaaaaaccagtaaggcgagaaaggatcgcggaggtggtacatggcttcatccaaagctatcggtcgcttttgcgcgttggtgcgatgctcggttcgctgtctggtgtgatttgcatatagatagcttgttgcgtggtgagctaacggagcagcaaaactatgaccaggcctgccgaattcgcgatgaccggaaatcaaaagcaagtggtggtgcacgagaaatggcacgttggcgctgggacaaacctgccctagaagcaaccgtggaattctggcaggagcaactgaagttaacgctcgatattgccagctaaaagaaaaactgagagccactttcacaacggctctccattaactaaaagcactcatatatcagataggcgatcccgaccaaagaggccatccctgtaaaggttagccccaatgccagggtggagtagctcactgttgcagccatgtaccaacttttaaatttagcccacatagtcatcatcctttttgttttgcaaaagaatgacagtcaaatcagagggatggaaattggttgtacagatcaataatcggctattgatcgtttaaaacgatcgttgaacaacgagacgggtcaactccgtcaagccgtagcaaggctgctatctcgctttattgcaggccacggattcaaatttgaagtaaggaaatgatggtgaccgataaaactgagtttgctcgcgtcgttccagaaataattcaagataaggccagcgattggctgcttgggaagcttgatgaagaacttgatgcgttaagagatttgggggcatcaggggtagacattactcaaattctacccggatccatcaggggggctaagtttagagccgaacttattagagaaacctttatcacgcagtattcagacgagaaataaccatggcaagcctgacacagaagcaagagacattctgtcaggcatacatcgaaacgggtaatgcttctgaggcatatcggacggcgtatgctgctgacaagatgaaacctgagaccattaaccggaaagctaaagagtcattagacaacggcaagatcacggcaaggattgccgaattgcagggtgagattaagcagcgccatcacgtcactgttgactctttgattagagaattggaagaggctcggaaatcagctttagcggctgagacgccacaatcatcagcagccgtagccgcaacaatgggcaaggccaagttgaccggcctggacaaagtgattgtcgagctgagtggcggagttaaggtcgagcacaaatctattaaggacatcttcgatggctaatccacatttcaagccattcgccgaaagcgctccatacaaaatagcttacggcggccgtggaagtgggaagtcatatttctttgcggaacttgccgtggaggttgcacgacgcattaacacggtaattttgtgtactcgcgagtttcagggttctattagcgactcagtccacaaattgctatgtgagactatcgatcgtctcggttattccacagaattcgaaatccagaaaaacacaatcattcacctagcaaccggtgctagcttcgtattctccggcattaaaaacaacgtcacaaaaataaaatccatacagggcgttggaatctgctgggtagaagaggccgaggcggtaacaaaagactcatgggatgtactgattccatccatacgaggcgacaaacactcagagatatgggtgagctttaacccgaagaacattcttgacgatacgtatcagcgcttcatcgtcaggcctcctgctggggcgattgttctgaaagccaattacaacgacaaccctcacttccatgactcaccgctccctgcgcaaatggctgaatgcaaagaacgtgattacgacctttacctgcacatttgggaaggtgagccggttgccgacagtgacttggcaattatcaagccatcgtggattgctgccgctatagatgcccataaactgattggcttcgccccttctggtcgtaagcgagtcggttttgacgtagcagatgaaggcgaggatagcaacgctacaacactggcccacggctctgttgtcatggactgccagcagtggaacaagggtgatgtaatcacatcatctgatcgcgtcaaaaactacgcagaaagcgtcacagcaagcgagattgtttacgactccattggcgtgggtgcaggcgtaaaagctcacctgaggcgcgtctgtgcgataccgtccagcggatttaacgcaggtgctgccgtattcaaaccagatgctaaatatgctgaaggcaagaccaataaagacatgttctccaatatcaaggctcaggcatggtggggagtccgtgatcgcttcttcaatacatggcgagtggttaagcacctcgaagccaaccccaacgacaaagaattcatcaaacaattttcagacgatcagctaatcagccttagctccggcattaaacaactggaatacctcaaggctgagctgtcacgcccatgggttgactacgacaataacggtcgcgtgaaggttgagagcaagaaagacatgaagaagcgtggcataccgtcaccaaatatggcggactcgctaatcatggcatttgctccggcgcacaaaccattcaacattcctgacgagatactgcaatgacaagaaagaaggctgtgcgaacagctcaagccgtgcaagcacctcggcgggaactggcgaagattacaaatgcgcatcttgatgcggcgtctgctgcgaatggcgagaagccatttgctgagtttaagcgttacgaaccgctaccaggtgtgattccagaagataaagaagaatccgctctagcgatggactccacgccttacgatgtcatcaacggcatgtttattggtggtgaatattctggctttcgtggctaccctattttggcggcaatgtctcagcaggttgagtatgcgaacatgcataccatcatggctgacgagatgacgcgaaactggattgaggtgaagagcaccaaagagggtgatcctgatatcgacctaatggataaggcgctgaccaaatacgacattaagcgcttgattcacgaagccgtaaggcaggactcagagtatggcgtggcacacatctttattgatgttggcgccgatgaccttgagaacgaaaaacccctatttctagacccgcgcaagataactaaaggctcacttaaaggctttcgttgcgtagaccctaattgggtttatccggcgatgtacaactcaaacaaaccgcttaggccagatttctacaaaccccaagcatggttcgtgatgggggatacggtgcatgagtctcgattcatcgatatcgttagccgcccagtgcccgacattctaaaaccatcatataacttcggcggtctttcgctgacgcagttaatggaggattacgttgttgactggcgagatgcgaagaagaacgtgataaagattcttcgaactcttcgaatgcgggcgctgaagacggatatggatgctaggttagaaatccctggtgaatttgataagcgcattaaaatgttcaccaagtatcaggataactttggtatatgggctctcgatactgaagaggatctgattcatatgcagacatcactgagtgagctgtcaagcatcctatcgaattaccaagagcaactctgcataccatcacgcaccaccaacctgaagatgtttggtaacgccccagcaggtttgaatgccagtggggatgctgagattgagacgtggcacgaaacgatatccggctcgcaagaactggactatcgcagagccattgagaacatcttcaagattatccagctttcagagtttggcgaactgaagcccgacatctacttcgagtttaaaccgcttgatgaggtcagcgatgatgaccgtgccaacaccaacaagactcgcgttgaaaccgtggttgctgctgctgatagcatgctgattaactctgaagaggcgcgagacgcactgaaaagcattgaaggtgcaggattcgaaaacctgaagggtgactatgaaccggaaaccgaagaagagtagaagccttcgggcggtcaactataacgccggtaatatcatttggtatcgcagagagttactggctgttatcagagaaatgaatgacgatgttaagaaacaaatcgtcccgatatttgaagataacccactggcgatggacgctaacccggttcaattgttgcgtagtgctttgcgtgctctgtctaggaagtgggtagagcgcttcattaagatggcgctacctactgccgaatcagtgacaaacaagactggcgaggctgttgaccgctcattacttgctgctgcccgtaaagactcaatgacaattaacatgcagtggactgaggctatgctcgaaaagcgagaggctatcatttcagagaatgtggcgttaatccgctccattcctgagaagtatttcactgaagtggaatcgatggtgtttcgctcagtagccaagggtggcgaccgcaaaggattggctgacgaaatggaagctaactttggcaagcgtcatggtattactcgcaggcgtgctgaattcattgcacgtgaccaggtacgcaaggctaccagcgcactatccaacgcaaggcaacaagcggcagggattaagcgaggcatctggttacacagtggcggcggtagcgaaccccgcaagaagcacgttcatgctaacgggaaggagttcgacctagataagggcctgccaatcggtgacaaagggcagcatgtgttgccgggtgaagagcctaattgcgggtgtgtatggaagccagtattgccattctgaaaatataaaacgaacaaggtcgcttaggcggccttttttattgcccgaaaaacaggaaagaacatgaaagatgtgaagtttgccttcgataaggcgagcgttcgtcgctatgacgttgacgggatgcttcatgttgaactgacgcctatcagcaaggctaacgtctgcgtctactacggcaaagagatacccgattgggaagcgttaggccttaaccctgacaaggcataccggttgctacgtgaccctgaagaactcaggaaagccgctccaacattcaacaacaaaccagttctagacactcacatcgctgtgtcggtaattgacccgccaaaagaacacattattggttcgactggcactgacgcagtgtacgaagctccgtatctgaagaattcgatgggcatttacgacatcaattccattatcggcgtagagaacaaacagcagcgagaaatctcatcttcataccgttatcggctcgacatgacgccgggcgagtacgagggcgaaccatacgatggcgttatgcgtgacatcgtttgtaaccatgtggcaatcgtgccaagtggccgggctggcccggatgtatttgtatatgactcactacctacaggactcaaactgatgtcaaaaatcaaacaactcatgagcatcttcaagccgctgatggctaacgatgccgaccctgaagctgtaaagaaagcggaagaggacgtggaaaagctcatcaaagacgacgagaaagaccccaaaacagcgaaggacgagatgaccgacgaagaaaaagaaaagttagccaaagacgaagcggagcaggctgagaaagacaagttagccaaagatgaggctgatagagccgataaagagaagatggcaaatgacagtaaattagctatggattcagcgattaaagccgttgaagcccgcgcagccgcgcttcgtcaggcagaacatgatattcagccgatcaagcatcatgcgattattgacatagcaatattgcatctcgctaggcgttcgggcagcgctggggtcggccacccagccacgaatattcaaatcaccgtgctgccatgaaatcgccagcgcatgttgcaggaaggccgggccgcaaatactggccaaacgacgttcatgctgcgaaggatctggggccgctcgatattggcgaaccagcttgccgttgtgagtgaggtgaatcgccacgtcgaagcgcgccaacgcgatgcggcgtaccacttcatcaatatggccgaattcggttttttccgtgcgcataaatttacgccgcgctggcgtgttataaaacaaatccagcacttccagcgtactgcctaccggatgggcggcgggtttgatggtcaccgccatatcccgcccttcggcgtaagcctgccaggcttcgttctgttcggcggtacgcgaggtcagcatcaaacgggaaaccgagctaatactggccaacgcctcaccgcgaaagcccatgctgagaatggcctccagatcttccaacgaactgattttactggttgcatggcgcgctaacgccagcgataagtcgtctttagctatcccacagccgttatcacggatgcggattaattttgcgccacctttctcaatatcaatatcgattcgcgtggcaccagcatccagactgttttccaccaactcctttactaccgacgcaggccgctctaccacttcaccggcggcaatttggttggcgagttgtggcggtaatatctgaatcggcataacaaatcccttcggttaagactgtggaatggtgagcgtttggccgagttgtaccgaaccagacttcagcttattcacgcgttgaatctcactttgagatacaccatatttcgccgcaatagcggataaagtatccccgcgtttaacctgatgcttgatcggtttggccgggctgattttcttcaccgcaggcaccttggcgacgctagctaccgcgctgccagatgcgggaattcgcaggcgctgcccaacccataccacgtctttcttcagcgtattattctgccgcatcgccgccatactgacaccgtactggctggcaatgccggatagagtttcaccccgttttaccatgtgaatcagcgatttaccgctaatggtggctttccccccactgctgaccgcactgactaccgggccaggctgattaacaccactttgacgcgctgacctttcaaccgccgctgttgcgcccagcggacggttttcgacctttgggtcggcttgtagcggatgcgacaggaaataactgcgcaagcctttgtaaatcgcttgggcaattttatcctgatacgcactgctgccgagcagccgctcctccgtaccattactgataaagccggtttccactaataaagagggaatgtccggtgaacgcaacacgccaagactggcgtgttccggcctacgtttatgaatagaaccaatggcttgaagctcatgtagcacttttaccgctacgtcgtaacccacccgctgggagtgaccaaattgtaaatccagcaccgcctgactgagataaggatcggc

SEQ ID NO: 2 - DNA, 5481 bp, synthetic construct
  source 1..5481: mol_type = other DNA
ccgcgattgtctcctctttttgcgcccgtgtttttcctcatgggttcaattaagccgaaaccttgtggtctcggcttttttaatgccaaaactaaatcgttaagctctatgggctgatataaactggactcagagtttctattcctgaagctccggtgtctctgcgtgggtacggcagaagatgaattaatgtctggcgtcattccgaaccctctgttttaaacgtttcacactggataataaatttacaaggacacaagtggtgttcatcctgtcactgcgatggggtagtctggtgttgttaatgaatgctgttagccaatctcattctagatttgactttttattgttataggtaatcatcgaaaaatcagcgatgtaactggaggttctccctaggttttcccttgaatgcttataataagttaacatacgtttttatctccctggctgctcaacaccttataaaatcgcggaaacaattaactctattgcgataattaaagtgtgtcggcattatcccgaaaagtatttcgtctaaaaattttcctatatagtgaaaatataaccttgatggatctgtaaaagatagagttgtgattaatataacgaacggacatgttcttcttgttgtttactttgtaagatttccctcgcaaagattgtaattcaaaatcatcactaattagaacgactttcttttttaatcgactgaatagttgatggatgttgttattgtttatcgtcatctctctttctggccaaaccaaagtgagtaaatcatccctatctattagctgaccgtttgacgcatgattaaccagtgcgataaataataaatactctttattcgttaactctacactacctttcaggctatacacaatcttttcatctgccactacaaaatacatcatggttaattcctcctgttagcccaaaaaaacgggtatggagaaacagtagagagttgcgataaaaagcgtcaggtaggatccgctaatcttatggataaaaatgctatggcatagcaaagtgtgacgccgtgcaaataatcaatgtggacttttctgccgtgattatagacacttttgttacgcgtttttgtcatggctttggtcccgctttgttacagaatgcttttaataagcggggttaccggtttggttagcgagaagagccagtaaaagacgcagtgacggcaatgtctgatgcaatatggacaattggtttcttctctgaatggcgggagtatgaaaagtatggctgaagcgcaaaatgatcccctgctgccgggatactcgtttaatgcccatctggtggcgggtttaacgccgattgaggccaacggttatctcgatttttttatcgaccgaccgctgggaatgaaaggttatattctcaatctcaccattcgcggtcagggggtggtgaaaaatcagggacgagaatttgtttgccgaccgggtgatattttgctgttcccgccaggagagattcatcactacggtcgtcatccggaggctcgcgaatggtatcaccagtgggtttactttcgtccgcgcgcctactggcatgaatggcttaactggccgtcaatatttgccaatacggggttctttcgcccggatgaagcgcaccagccgcatttcagcgacctgtttgggcaaatcattaacgccgggcaaggggaagggcgctattcggagctgctggcgataaatctgcttgagcaattgttactgcggcgcatggaagcgattaacgagtcgctccatccaccgatggataatcgggtacgcgaggcttgtcagtacatcagcgatcacctggcagacagcaattttgatatcgccagcgtcgcacagcatgtttgcttgtcgccgtcgcgtctgtcacatcttttccgccagcagttagggattagcgtcttaagctggcgcgaggaccaacgtatcagccaggcgaagctgcttttgagcaccacccggatgcctatcgccaccgtcggtcgcaatgttggttttgacgatcaactctatttctcgcgggtatttaaaaaatgcaccggggccagcccgagcgagttccgtgccggttgtgaagaaaaagtgaatgatgtagccgtcaagttgtcataattggtaacgaatcagacaattgacggcttgacggagtagcatagtgatcggcacgtaagaggttccaactttcaccataatgaaataagatcactaccgggcgtattttttgagttatcgagattttcaggagctaaggaagctaaaatggagaaaaaaatcactggatataccaccgttgatatatcccaatggcatcgtaaagaacattttgaggcatttcagtcagttgctcaatgtacctataaccagaccgttcagctggatattacggcctttttaaagaccgtaaagaaaaataagcacaagttttatccggcctttattcacattcttgcccgcctgatgaatgctcatccggagttccgtatggcaatgaaagacggtgagctggtgatatgggatagtgttcacccttgttacaccgttttccatgagcaaactgaaacgttttcatcgctctggagtgaataccacgacgatttccggcagtttctacacatatattcgcaagatgtggcgtgttacggtgaaaacctggcctatttccctaaagggtttattgagaatatgtttttcgtctcagccaatccctgggtgagtttcaccagttttgatttaaacgtggccaatatggacaacttcttcgcccccgttttcactatgggcaaatattatacgcaaggcgacaaggtgctgatgccgctggcgattcaggttcatcatgccgtttgtgatggcttccatgtcggcagaatgcttaatgaattacaacagtactgcgatgagtggcagggcggggcgtaatttttttaaggcagttattgctcctccttaaaattagaatgcccgcaatatatcgcaacaaaagtaattttgtaaggctacccttggttattgtttgttaatattgatgagcttcatatttttaccaaatataacgtaataagttgttgttgtaatgctttgctgctatttttttatatttctttagccagtgtaattagcttattatttaattaaacatagcgatattgagcttatcttattgatccttcttattcgattgaactaattgttcaataatatgaacaaatacatgtgcaaaaatagaacgcttgtcccctgtgtttacagagtttctctgtcatttcgaagattcagatattacttcattgctgcttttatcatcaggtaagtgtgggtgagtagagtgattatcttcataaatgactaaatccaatagacgcagatttatattaatcttgagcctgcgtcattctgacgttaactgcggcttagcatcaataatagagagtaatataattcttatattgctattcaagctgattataaagtatttaattttacacatataattaattaagttgcttatagatggtgaggttggtttgttgtctttatgtaattaatcacaaaaataaaattcaattactaagtatcaaaaaactataaatatcgattagattatgttcgttagctcaaatcaacgggcttgaggttacctggatgaataaaatggatgttcaatgaaaaccttcagttagacaaaataaattctttgttctttgtatttaaaacaccaacggaatccgttaatggcagcgagcaggatttatatttttgctgcttttatctgctttctcagcatccaagatctatttatcacgaatggggagggctatgaaaaattatcaggaaaaaggctggtgacggccagattaaagggacgaggccgtaatggcgaatgatcctcagtggtttaaacagtacggaaatcagaaaaacacgattgttcgctggcccgtaaggccgtgaagaacaggatggggaggggatatgacgttaaagattccgactgatacacaggcaattacctggttaattattggccttttttcagcttggggaggtgttgtgagatatctcatggatatgcaagggcacagggggagttggagttggatgggaataataagtcagatcattatttcaagcttcactggccttttggggggattactcagctttgaaaatggcagtagtcattacatgacttttgctattgcaggcttatttggcaccttggggagtacggcgttgagttacctgtggcggcgtttcttggggagtccggagaaaaatcgtgggtaactttacttttagtcaaatcagtcaacgcaatctacaaggcatacacccggatctcgttcgggtggtgtacctggcactcaaattgtccgaggtggattttcgcgttatcgaagggctgcgtgatagcgcacgtcaacggcaaatggtgcttaatggcaagagccaaacgctcaatagccggcatcttaccggtcatgcggtcgatttggcgccttggttcaacaacacgattccctggaacgattggggagcgtttgctcaggttgcagcggcgatgaaacaggcggcgaagcaactacaaattcctgtgatctggggcggtgactggacgacgcttaaggatgggccgcactttgagttgccgaggatgcagtatccatgagtctgctcagtgttttgaaacgtggtctgctacttgccacgctatttgcggttttggttggcgggctgtgggttgctcaactgaaaaagaccgcgacattactgaattctgaaaatatcagtctgacgcagcagaatcagctttatctgcaacggttgcaaggatatgaccagcagatgaaaacactggatgaggcgttaaccactaatgccataactcagcgtcaggcagaggagaaatatcatgcgatcgaacaacaaatgcggcggctgctggctaatagccgctgcgctcgggagcctgtgcctgatgctgttatccggttgcagcaacgagcacttggccaaagcctgcccggtgcagccaatagtaccgaaagcgctgctattgccccatgatcccccgttatttaacgtcacaaagtggggggactatcccggttatgtggaagaattaaatctatcgttggcgcgttgtaatgcagataaaacggcggtggcccaaataatgtctccccaaaaaggataaatctctcttttagtcaattcagacaagggcattgactctataagattggcaaacatggatttaccgattttgtactcaatatcgaggcgctgccgtaagcatgcctggcaaaagcaggataataggttattggttgcgaaagaaacacggcggttaggggcgctcttcgctaggatgacagtcaagcttactgcaaaaagaaatctatgctggcacaaatccgatggcaaaaagtaggcgcgttatgtttcgctc

SEQ ID NO: 3 - DNA, 6492 bp, synthetic construct
  source 1..6492: mol_type = other DNA
ttgagatcctttttttctgcgcgtaatctgctgcttgcaaacaaaaaaaccaccgctaccagcggtggtttgtttgccggatcaagagctaccaactctttttccgaaggtaactggcttcagcagagcgcagataccaaatactgtccttctagtgtagccgtagttaggccaccacttcaagaactctgtagcaccgcctacatacctcgctctgctaatcctgttaccagtggctgctgccagtggcgataagtcgtgtcttaccgggttggactcaagacgatagttaccggataaggcgcagcggtcgggctgaacggggggttcgtgcacacagcccagcttggagcgaacgacctacaccgaactgagatacctacagcgtgagctatgagaaagcgccacgcttcccgaagggagaaaggcggacaggtatccggtaagcggcagggtcggaacaggagagcgcacgagggagcttccagggggaaacgcctggtatctttatagtcctgtcgggtttcgccacctctgacttgagcgtcgatttttgtgatgctcgtcaggggggcggagcctatggaaaaacgccagcaacgcggcctttttacggttcctggccttttgctggccttttgctcacatgttctttcctgcgttatcccctgattctgtggataaccgtattaccgcctttgagtgagctgataccgctcgccgcagccgaacgaccgagcgcagcgagtcagtgagcgaggaagcggaagagcgcctgatgcggtattttctccttacgcatctgtgcggtatttcacaccgcatatatggtgcactctcagtacaatctgctctgatgccgcatagttaagccagtatacactccgctatcgctacgtgactgggtcatggctgcgccccgacacccgccaacacccgctgacgcgccctgacgggcttgtctgctcccggcatccgcttacagacaagctgtgaccgtctccgggagctgcatgtgtcagaggttttcaccgtcatcaccgaaacgcgcgaggcagctgcggtaaagctcatcagcgtggtcgtgaagcgattcacagatgtctgcctgttcatccgcgtccagctcgttgagtttctccagaagcgttaatgtctggcttctgataaagcgggccatgttaagggcggttttttcctgtttggtcactgatgcctccgtgtaagggggatttctgttcatgggggtaatgataccgatgaaacgagagaggatgctcacgatacgggttactgatgatgaacatgcccggttactggaacgttgtgagggtaaacaactggcggtatggatgcggcgggaccagagaaaaatcactcagggtcaatgccagcgcttcgttaatacagatgtaggtgttccacagggtagccagcagcatcctgcgatgcagatccggaacataatggtgcagggcgctgacttccgcgtttccagactttacgaaacacggaaaccgaagaccattcatgttgttgctcaggtcgcagacgttttgcagcagcagtcgcttcacgttcgctcgcgtatcggtgattcattctgctaaccagtaaggcaaccccgccagcctagccgggtcctcaacgacaggagcacgatcatgcgcacccgtggggccgccatgccggcgataatggcctgcttctcgccgaaacgtttggtggcgggaccagtgacgaaggcttgagcgagggcgtgcaagattccgaataccgcaagcgacaggccgatcatcgtcgcgctccagcgaaagcggtcctcgccgaaaatgacccagagcgctgccggcacctgtcctacgagttgcatgataaagaagacagtcataagtgcggcgacgatagtcatgccccgcgcccaccggaaggagctgactgggttgaaggctctcaagggcatcggtcgagatcccggtgcctaatgagtgagctaacttacattaattgcgttgcgcttccggtagtcaataaaccggtaaaccagcaatagacataagcggctatttaacgaccctgccctgaaccgacgaccgggtcgaatttgctttcgaatttctgccattcatccgcttattatcacttattcaggcgtagcaccaggcgtttaagggcaccaataactgccttaaaaaaattacgccccgccctgccactcatcgcagtactgttgtaattcattaagcattctgccgacatggaagccatcacaaacggcatgatgaacctgaatcgccagcggcatcagcaccttgtcgccttgcgtataatatttgcccatagtgaaaacgggggcgaagaagttgtccatattggccacgtttaaatcaaaactggtgaaactcacccagggattggctgagacgaaaaacatattctcaataaaccctttagggaaataggccaggttttcaccgtaacacgccacatcttgcgaatatatgtgtagaaactgccggaaatcgtcgtggtattcactccagagcgatgaaaacgtttcagtttgctcatggaaaacggtgtaacaagggtgaacactatcccatatcaccagctcaccgtctttcattgccatacggaactccggatgagcattcatcaggcgggcaagaatgtgaataaaggccggataaaacttgtgcttatttttctttacggtctttaaaaaggccgtaatatccagctgaacggtctggttataggtacattgagcaactgactgaaatgcctcaaaatgttctttacgatgccattgggatatatcaacggtggtatatccagtgatttttttctccattttagcttccttagctcctgaaaatctcgataactcaaaaaatacgcccggtagtgatcttatttcattatggtgaaagttggaacctcttacgtgccgatcaacgtctcattttcgccaaaagttggcccagggcttcccggtatcaacagggacaccaggatttatttattctgcgaagtgatcttccgtcacaggtatttattcggcgcaaagtgcgtcgggtgatgctgccaacttactgcaatttaccgaacaactccgcggccgggaagccgatctcggcttgaacgaattgttaggtggcggtacttgggtcgatatcaaagtgcatcacttcttcccgtatgcccaactttgtatagagagccactgcgggatcgtcaccgtaatctgcttgcacgtagatcacataagcaccaagcgcgttggcctcatgcttgaggagattgatgagcgcggtggcaatgccctgcctccggtgctcgccggagactgcgagatcatagatatagatctcactacgcggctgctcaaacttgggcagaacgtaagccgcgagagcgccaacaaccgcttcttggtcgaaggcagcaagcgcgatgaatgtcttactacggagcaagttcccgaggtaatcggagtccggctgatgttgggagtaggtggctacgtctccgaactcacgaccgaaaagatcaagagcagcccgcatggatttgacttggtcagggccgagcctacatgtgcgaatgatgcccatacttgagccacctaactttgttttagggcgactgccctgctgcgtaacatcgttgctgctgcgtaacatcgttgctgctccataacatcaaacatcgacccacggcgtaacgcgcttgctgcttggatgcccgaggcatagactgtacaaaaaaacagtcataacaagccatgaaaaccgccactgcgccgttaccaccgctgcgttcggtcaaggttctggaccagttgcgtgagcgcatacgctacttgcattacagtttacgaaccgaacaggcttatgtcaactggctactccgtcaagccgtcaattgtctgattcgttaccttaagacccactttcacatttaagttgtttttctaatccgcatatgatcaattcaaggccgaataagaaggctggctctgcaccttggtgatcaaataattcgatagcttgtcgtaataatggcggcatactatcagtagtaggtgtttccctttcttctttagcgacttgatgctcttgatcttccaatacgcaacctaaagtaaaatgccccacagcgctgagtgcatataatgcattctctagtgaaaaaccttgttggcataaaaaggctaattgattttcgagagtttcatactgtttttctgtaggccgtgtacctaaatgtacttttgctccatcgcgatgacttagtaaagcacatctaaaacttttagcgttattacgtaaaaaatcttgccagctttccccttctaaagggcaaaagtgagtatggtgcctatctaacatctcaatggctaaggcgtcgagcaaagcccgcttattttttacatgccaatacaatgtaggctgctctacacctagcttctgggcgagtttacgggttgttaaaccttcgattccgacctcattaagcagctctaatgcgctgttaatcactttacttttatctaatctagacatcattaattcctaatttttgttgacactctatcattgatagagttattttaccactccctatcagtgatagagaacccgtttttttgggctaacaggaggaattaaccatgaccaaaactgactatctgatgcgtttaagaaaatgcacaacaattgacactttagaacgtgttattgaaaaaaatacgtatgaactatctgatgacgaactggaattattctactccgccgcagatcatcgcctggctgagctaactatgaataaactgtatgataagattcctatgggtgtttggaagtatgtaaggtaagaaaggaagctgagttggctgctgccaccgctgagcaataactagcataaccccttggggcctctaaacgggtcttgaggggttttttgctgaaaggaggaactatatccggattggcgaatgggacgcgccctgtagcggcgcattaagcgcggcgggtgtggtggttacgcgcagcgtgaccgctacacttgccagcgccctagcgcccgctcctttcgctttcttcccttcctttctcgccacgttcgccggctttccccgtcaagctctaaatcgggggctccctttagggttccgatttagtgctttacggcacctcgaccccaaaaaacttgattagggtgatggttcacgtagtgggccatcgccctgatagacggtttttcgccctttgacgttggagtccacgttctttaatagtggactcttgttccaaactggaacaacactcaaccctatctcggtctattcttttgatttataagggattttgccgatttcggcctattggttaaaaaatgagctgatttaacaaaaatttaacgcgaattttaacaaaatattaacgtttacaatttcaggtggcacttttcggggaaatgtgcgcggaacccctatttgtttatttttctaaatacattcaaatatgtatccgctcatgaattaattcttagaaaaactcatcgagcatcaaatgaaactgcaatttattcatatcaggattatcaataccatatttttgaaaaagccgtttctgtaatgaaggagaaaactcaccgaggcagttccataggatggcaagatcctggtatcggtctgcgattccgactcgtccaacatcaatacaacctattaatttcccctcgtcaaaaataaggttatcaagtgagaaatcaccatgagtgacgactgaatccggtgagaatggcaaaagtttatgcatttctttccagacttgttcaacaggccagccattacgctcgtcatcaaaatcactcgcatcaaccaaaccgttattcattcgtgattgcgcctgagcgagacgaaatacgcgatcgctgttaaaaggacaattacaaacaggaatcgaatgcaaccggcgcaggaacactgccagcgcatcaacaatattttcacctgaatcaggatattcttctaatacctggaatgctgttttcccggggatcgcagtggtgagtaaccatgcatcatcaggagtacggataaaatgcttgatggtcggaagaggcataaattccgtcagccagtttagtctgaccatctcatctgtaacatcattggcaacgctacctttgccatgtttcagaaacaactctggcgcatcgggcttcccatacaatcgatagattgtcgcacctgattgcccgacattatcgcgagcccatttatacccatataaatcagcatccatgttggaatttaatcgcggcctagagcaagacgtttcccgttgaatatggctcataacaccccttgtattactgtttatgtaagcagacagttttattgttcatgaccaaaatcccttaacgtgagttttcgttccactgagcgtcagaccccgtagaaaagatcaaaggatcttc

SEQ ID NO: 4 - protein, 104 aa, Yersinia entomophaga
MTLKIPTDTQAITWLIIGLFSAWGGVVRYLMDMQGHRGSWSWMGIISQIIISSFTGLLGGLLSFENGSSHYMTFAIAGLFGTLGSTALSYLWRRFLGSPEKNRG

SEQ ID NO: 5 - protein, 129 aa, Yersinia entomophaga
MGNFTFSQISQRNLQGIHPDLVRVVYLALKLSEVDFRVIEGLRDSARQRQMVLNGKSQTLNSRHLTGHAVDLAPWFNNTIPWNDWGAFAQVAAAMKQAAKQLQIPVIWGGDWTTLKDGPHFELPRMQYP

SEQ ID NO: 6 - protein, 133 aa, Yersinia entomophaga
MSLLSVLKRGLLLATLFAVLVGGLWVAQLKKTATLLNSENISLTQQNQLYLQRLQGYDQQMKTLDEALTTNAITQRQAEEKYHAIEQQMRRLLANSRCAREPVPDAVIRLQQRALGQSLPGAANSTESAAIAP

SEQ ID NO: 7 - protein, 94 aa, Yersinia entomophaga
MRSNNKCGGCWLIAAALGSLCLMLLSGCSNEHLAKACPVQPIVPKALLLPHDPPLFNVTKWGDYPGYVEELNLSLARCNADKTAVAQIMSPQKG

SEQ ID NO: 8 - DNA, 3349 bp, synthetic construct
  source 1..3349: mol_type = other DNA
ccgcgattgtctcctctttttgcgcccgtgtttttcctcatgggttcaattaagccgaaaccttgtggtctcggcttttttaatgccaaaactaaatcgttaagctctatgggctgatataaactggactcagagtttctattcctgaagctccggtgtctctgcgtgggtacggcagaagatgaattaatgtctggcgtcattccgaaccctctgttttaaacgtttcacactggataataaatttacaaggacacaagtggtgttcatcctgtcactgcgatggggtagtctggtgttgttaatgaatgctgttagccaatctcattctagatttgactttttattgttataggtaatcatcgaaaaatcagcgatgtaactggaggttctccctaggttttcccttgaatgcttataataagttaacatacgtttttatctccctggctgctcaacaccttataaaatcgcggaaacaattaactctattgcgataattaaagtgtgtcggcattatcccgaaaagtatttcgtctaaaaattttcctatatagtgaaaatataaccttgatggatctgtaaaagatagagttgtgattaatataacgaacggacatgttcttcttgttgtttactttgtaagatttccctcgcaaagattgtaattcaaaatcatcactaattagaacgactttcttttttaatcgactgaatagttgatggatgttgttattgtttatcgtcatctctctttctggccaaaccaaagtgagtaaatcatccctatctattagctgaccgtttgacgcatgattaaccagtgcgataaataataaatactctttattcgttaactctacactacctttcaggctatacacaatcttttcatctgccactacaaaatacatcatggttaattcctcctgttagcccaaaaaaacgggtatggagaaacagtagagagttgcgataaaaagcgtcaggtaggatccgctaatcttatggataaaaatgctatggcatagcaaagtgtgacgccgtgcaaataatcaatgtggacttttctgccgtgattatagacacttttgttacgcgtttttgtcatggctttggtcccgctttgttacagaatgcttttaataagcggggttaccggtttggttagcgagaagagccagtaaaagacgcagtgacggcaatgtctgatgcaatatggacaattggtttcttctctgaatggcgggagtatgaaaagtatggctgaagcgcaaaatgatcccctgctgccgggatactcgtttaatgcccatctggtggcgggtttaacgccgattgaggccaacggttatctcgatttttttatcgaccgaccgctgggaatgaaaggttatattctcaatctcaccattcgcggtcagggggtggtgaaaaatcagggacgagaatttgtttgccgaccgggtgatattttgctgttcccgccaggagagattcatcactacggtcgtcatccggaggctcgcgaatggtatcaccagtgggtttactttcgtccgcgcgcctactggcatgaatggcttaactggccgtcaatatttgccaatacggggttctttcgcccggatgaagcgcaccagccgcatttcagcgacctgtttgggcaaatcattaacgccgggcaaggggaagggcgctattcggagctgctggcgataaatctgcttgagcaattgttactgcggcgcatggaagcgattaacgagtcgctccatccaccgatggataatcgggtacgcgaggcttgtcagtacatcagcgatcacctggcagacagcaattttgatatcgccagcgtcgcacagcatgtttgcttgtcgccgtcgcgtctgtcacatcttttccgccagcagttagggattagcgtcttaagctggcgcgaggaccaacgtatcagccaggcgaagctgcttttgagcaccacccggatgcctatcgccaccgtcggtcgcaatgttggttttgacgatcaactctatttctcgcgggtatttaaaaaatgcaccggggccagcccgagcgagttccgtgccggttgtgaagaaaaagtgaatgatgtagccgtcaagttgtcataattggtaacgaatcagacaattgacggcttgacggagtagcatagtgatcggcacgtaagaggttccaactttcaccataatgaaataagatcactaccgggcgtattttttgagttatcgagattttcaggagctaaggaagctaaaatggagaaaaaaatcactggatataccaccgttgatatatcccaatggcatcgtaaagaacattttgaggcatttcagtcagttgctcaatgtacctataaccagaccgttcagctggatattacggcctttttaaagaccgtaaagaaaaataagcacaagttttatccggcctttattcacattcttgcccgcctgatgaatgctcatccggagttccgtatggcaatgaaagacggtgagctggtgatatgggatagtgttcacccttgttacaccgttttccatgagcaaactgaaacgttttcatcgctctggagtgaataccacgacgatttccggcagtttctacacatatattcgcaagatgtggcgtgttacggtgaaaacctggcctatttccctaaagggtttattgagaatatgtttttcgtctcagccaatccctgggtgagtttcaccagttttgatttaaacgtggccaatatggacaacttcttcgcccccgttttcactatgggcaaatattatacgcaaggcgacaaggtgctgatgccgctggcgattcaggttcatcatgccgtttgtgatggcttccatgtcggcagaatgcttaatgaattacaacagtactgcgatgagtggcagggcggggcgtaatttttttaaggcagttattgccgttatttaacgtcacaaagtggggggactatcccggttatgtggaagaattaaatctatcgttggcgcgttgtaatgcagataaaacggcggtggcccaaataatgtctccccaaaaaggataaatctctcttttagtcaattcagacaagggcattgactctataagattggcaaacatggatttaccgattttgtactcaatatcgaggcgctgccgtaagcatgcctggcaaaagcaggataataggttattggttgcgaaagaaacacggcggttaggggcgctcttcgctaggatgacagtcaagcttactgcaaaaagaaatctatgctggcacaaatccgatggcaaaaagtaggcgcgttatgtttcgctc

SEQ ID NO: 9 - protein, 1372 aa, synthetic construct
MSNSIEAKLQEDLRDALVDYYLGQIVPNSKDFTNLRSTIKNVDDLYDHLLLDTQVSAKVITSRLSLVTQSVQQYINRIALNLEPGLSINQQEATDWEEFANRYGYWAANQQLRMFPEIYVDPTLRLTKTEFFFQLESALNQGKLTDDVAQKAVLGYLNNFEEVSNLEIIAGYQDGIDIENDKTYFVARTRMQPYRYFWRSLDASQRNANSQELYPTAWSEWKAISVPLENVANGIVRPIMMDNRLYISWFEVAEEKETDSDGNIIVSGRYRTKIRLAHLGFDGVWSSGTTLREEVLADQMEEMIAVVDRMEDEPRLALVAFKEMSESWDVVFSYICDSMLIESSNLPTTTHPPKPGDGDKGLSDLDDYGANLVWFYLHETANGGKAEYKQLILYPVIINRDWPIELDKTHQGDFGTVDDFTLNSNYTGDELSLYLQSSSTYKYDFSKSKNIIYGIWKEDANNNRCWLNYKLLTPEDYEPQINATLVMCDKGDVNIITGFSLPNGGVDAGGKIKVTLRVGKKLRDKFQIKQFSQTQYLQFPEASSADVWYIGKQIRLNTLFAKELIGKASRSLDLVLSWETQNSRLEEAILGGAAELIDLDGANGIYFWELFFHMPFMVSWRFNVEQRYEDANRWVKYLFNPFECEDEPALLLGKPPYWNSRPLVDEPFKGYSLTQPSDPDAIAASDPIHYRKAVFNFLTKNIIDQGDMEYRKLQPSARTLARLSYSTASSLLGRRPDVQLTSFWQPLTLEDASYKTDSEIRAIEMQSQPLTFEPVVHDQTMSAVDNDIFMYPMNNELRGLWDRIENRIYNLRHNLTLDGKEINMDLYDSSISPRGLMKQRYQRVVTARNASKMNFKVPNYRFEPMLNRSKSGVETLIQFGSTLLSLLERKDSLSFDAYQMIQSGDLYRFSIDLQQQDIDINKASLEALQVSKQSAQDRYDHFKELYDENISSTEQKVIELQSQAANSLLMAQGMRTAAAALDVIPNIYGLAVGGSHWGAPLNAAAEIIMIKYQADSSKSESLSVSESYRRRRQEWELQYKQAEWEVNSVEQQINLQNMQIKAANKRLEQVEAQQQQAMALLDYFSERFTNESLYTWLISQLSSLYLQAYDAVLSLCLSAEASLLYELNLGEQSFVGGGGWNDLYQGLMAGETLKLALMRMERVYVEQNSRRQEITKTISLKALLGESWPAELNKLKQKTPINFNLEEQIFVEDYQELYQRRIKSVSVSLPMLVGPYEDVCAQLTQTSSSYSTRADLKTVENMLTKRTFADTPHLVRSIQPNQQISLSTGVNDSGLFMLNFDDERFLPFEGSGVDSSWRLQFTNLKQNLDSLNDVILHVKYTAAIGSSTFSQGVRKILANINNDEHHHHHHHH

SEQ ID NO: 10 - protein, 138 aa, Yersinia entomophaga
MMYFVVADEKIVYSLKGSVELTNKEYLLFIALVNHASNGQLIDRDDLLTLVWPEREMTINNNNIHQLFSRLKKKVVLISDDFELQSLRGKSYKVNNKKNMSVRYINHNSIFYRSIKVIFSLYRKIFRRNTFRDNADTL

SEQ ID NO: 11 - DNA, 14963 bp, synthetic construct
  source 1..14963: mol_type = other DNA
gagttatacacagggctgggatctattctttttatctttttttattctttctttattctataaattataaccacttgaatataaacaaaaaaaacacacaaaggtctagcggaatttacagagggtctagcagaatttacaagttttccagcaaaggtctagcagaatttacagatacccacaactcaaaggaaaaggactagtaattatcattgactagcccatctcaattggtatagtgattaaaatcacctagaccaattgagatgtatgtctgaattagttgttttcaaagcaaatgaactagcgattagtcgctatgacttaacggagcatgaaaccaagctaattttatgctgtgtggcactactcaaccccacgattgaaaaccctacaaggaaagaacggacggtatcgttcacttataaccaatacgctcagatgatgaacatcagtagggaaaatgcttatggtgtattagctaaagcaaccagagagctgatgacgagaactgtggaaatcaggaatcctttggttaaaggctttgagattttccagtggacaaactatgccaagttctcaagcgaaaaattagaattagtttttagtgaagagatattgccttatcttttccagttaaaaaaattcataaaatataatctggaacatgttaagtcttttgaaaacaaatactctatgaggatttatgagtggttattaaaagaactaacacaaaagaaaactcacaaggcaaatatagagattagccttgatgaatttaagttcatgttaatgcttgaaaataactaccatgagtttaaaaggcttaaccaatgggttttgaaaccaataagtaaagatttaaacacttacagcaatatgaaattggtggttgataagcgaggccgcccgactgatacgttgattttccaagttgaactagatagacaaatggatctcgtaaccgaacttgagaacaaccagataaaaatgaatggtgacaaaataccaacaaccattacatcagattcctacctacgtaacggactaagaaaaacactacacgatgctttaactgcaaaaattcagctcaccagttttgaggcaaaatttttgagtgacatgcaaagtaagtatgatctcaatggttcgttctcatggctcacgcaaaaacaacgaaccacactagagaacatactggctaaatacggaaggatctgaggttcttatggctcttgtatctatcagtgaagcatcaagactaacaaacaaaagtagaacaactgttcaccgttacatatcaaagggaaaactgtccatacccatggaaggcgaagcggcatgcatttacgttgacaccatcgaatggtgcaaaacctttcgcggtatggcatgatagcgcccggaagagagtcaattcagggtggtgaatgtgaaaccagtaacgttatacgatgtcgcagagtatgccggtgtctcttatcagaccgtttcccgcgtggtgaaccaggccagccacgtttctgcgaaaacgcgggaaaaagtggaagcggcgatggcggagctgaattacattcccaaccgcgtggcacaacaactggcgggcaaacagtcgttgctgattggcgttgccacctccagtctggccctgcacgcgccgtcgcaaattgtcgcggcgattaaatctcgcgccgatcaactgggtgccagcgtggtggtgtcgatggtagaacgaagcggcgtcgaagcctgtaaagcggcggtgcacaatcttctcgcgcaacgcgtcagtgggctgatcattaactatccgctggatgaccaggatgccattgctgtggaagctgcctgcactaatgttccggcgttatttcttgatgtctctgaccagacacccatcaacagtattattttctcccatgaagacggtacgcgactgggcgtggagcatctggtcgcattgggtcaccagcaaatcgcgctgttagcgggcccattaagttctgtctcggcgcgtctgcgtctggctggctggcataaatatctcactcgcaatcaaattcagccgatagcggaacgggaaggcgactggagtgccatgtccggttttcaacaaaccatgcaaatgctgaatgagggcatcgttcccactgcgatgctggttgccaacgatcagatggcgctgggcgcaatgcgcgccattaccgagtccgggctgcgcgttggtgcggatatctcggtagtgggatacgacgataccgaagacagctcatgttatatcccgccgtcaaccaccatcaaacaggattttcgcctgctggggcaaaccagcgtggaccgcttgctgcaactctctcagggccaggcggtgaagggcaatcagctgttgcccgtctcactggtgaaaagaaaaaccaccctggcgcccaatacgcaaaccgcctctccccgcgcgttggccgattcattaatgcagctggcacgacaggtttcccgactggaaagcgggcagtgagcgcaacgcaattaatgtgagttagcgcgaattgatctggtttgacagcttatcatcgactgcacggtgcaccaatgcttctggcgtcaggcagccatcggaagctgtggtatggctgtgcaggtcgtaaatcactgcataattcgtgtcgctcaaggcgcactcccgttctggataatgttttttgcgccgacatcataacggttctggcaaatattctgaaatgagctgttgacaattaatcatccggctcgtataatgtgtggaattgtgagcggataacaatttcacacaggaaacagcatatgcatcaaaaaaaccaggtaatgaacctgggtccgaactctaaactgctgaaagaatacaaatcccagctgatcgaactgaacatcgaacagttcgaagcaggtatcggtctgatcctgggtgatgcttacatccgttctcgtgatgaaggtaaaacctactgtatgcagttcgagtggaaaaacaaagcatacatggaccacgtatgtctgctgtacgatcagtgggtactgtccccgccgcacaaaaaagaacgtgttaaccacctgggtaacctggtaatcacctggggcgcccagactttcaaacaccaagctttcaacaaactggctaacctgttcatcgttaacaacaaaaaaaccatcccgaacaacctggttgaaaactacctgaccccgatgtctctggcatactggttcatggatgatggtggtaaatgggattacaacaaaaactctaccaacaaatcgatcgtactgaacacccagtctttcactttcgaagaagtagaatacctggttaagggtctgcgtaacaaattccaactgaactgttacgtaaaaatcaacaaaaacaaaccgatcatctacatcgattctatgtcttacctgatcttctacaacctgatcaaaccgtacctgatcccgcagatgatgtacaaactgccgaacactatctcctccgaaactttcctgaaataataaccatggattcttcgtctgtttctactggtattggcacaaacctgattccaatttgagcaaggctatgtgccatctcgatactcgttcttaactcaacagaagatgctttgtgcatacagcccctcgtttattatttatctcctcagccagccgctgtgctttcagtggatttcggataacagaaaggccgggaaatacccagcctcgctttgtaacggagtagacgaaagtgattgcgcctacccggatattatcgtgaggatgcgtcatcgccattgctccccaaatacaaaaccaatttcagccagtgcctcgtccattttttcgatgaactccggcacgatctcgtcaaaactcgccatgtacttttcatcccgctcaatcacgacataatgcaggccttcacgcttcatacgcgggtcatagttggcaaagtaccaggcattttttcgcgtcacccacatgctgtactgcacctgggccatgtaagctgactttatggcctcgaaaccaccgagccggaacttcatgaaatcccgggaggtaaacgggcatttcagttcaaggccgttgccgtcactgcataaaccatcgggagagcaggcggtacgcatactttcgtcgcgatagatgatcggggattcagtaacattcacgccggaagtgaattcaaacagggttctggcgtcgttctcgtactgttttccccaggccagtgctttagcgttaacttccggagccacaccggtgcaaacctcagcaagcagggtgtggaagtaggacattttcatgtcaggccacttctttccggagcggggttttgctatcacgttgtgaacttctgaagcggtgatgacgccgagccgtaatttgtgccacgcatcatccccctgttcgacagctctcacatcgatcccggtacgctgcaggataatgtccggtgtcatgctgccaccttctgctctgcggctttctgtttcaggaatccaagagcttttactgcttcggcctgtgtcagttctgacgatgcacgaatgtcgcggcgaaatatctgggaacagagcggcaataagtcgtcatcccatgttttatccagggcgatcagcagagtgttaatctcctgcatggtttcatcgttaaccggagtgatgtcgcgttccggctgacgttctgcagtgtatgcagtattttcgacaatgcgctcggcttcatccttgtcatagataccagcaaatccgaaggccagacgggcacactgaatcatggctttatgacgtaacatccgtttgggatgcgactgccacggccccgtgatttctctgccttcgcgagttttgaatggttcgcggcggcattcatccatccattcggtaacgcagatcggatgattacggtccttgcggtaaatccggcatgtacaggattcattgtcctgctcaaagtccatgccatcaaactgctggttttcattgatgatgcgggaccagccatcaacgcccaccaccggaacgatgccattctgcttatcaggaaaggcgtaaatttctttcgtccacggattaaggccgtactggttggcaacgatcagtaatgcgatgaactgcgcatcgctggcatcacctttaaatgccgtctggcgaagagtggtgatcagttcctgtgggtcgacagaatccatgccgacacgttcagccagcttcccagccagcgttgcgagtgcagtactcattcgttttatacctctgaatcaatatcaacctggtggtgagcaatggtttcaaccatgtaccggatgtgttctgccatgcgctcctgaaactcaacatcgtcatcaaacgcacgggtaatggattttttgctggccccgtggcgttgcaaatgatcgatgcatagcgattcaaacaggtgctggggcaggcctttttccatgtcgtctgccagttctgcctctttctcttcacgggcgagctgctggtagtgacgcgcccagctctgagcctcaagacgatcctgaatgtaataagcgttcatggctgaactcctgaaatagctgtgaaaatatcgcccgcgaaatgccgggctgattaggaaaacaggaaagggggttagtgaatgcttttgcttgatctcagtttcagtattaatatccattttttataacctccttagagctcgaattcccaaaaaaacgggtatggagaaacagtagagagttgcgataaaaagcgtcaggtaggatccgctaatcttatggataaaaatgctatggcatagcaaagtgtgacgccgtgcaaataatcaatgtggacttttctgccgtgattatagacacttttgttacgcgtttttgtcatggctttggtcccgctttgttacagaatgcttttaataagcggggttaccggtttggttagcgagaagagccagtaaaagacgcagtgacggcaatgtctgatgcaatatggacaattggtttcttctctgaatggcgggagtatgaaaagtatggctgaagcgcaaaatgatcccctgctgccgggatactcgtttaatgcccatctggtggcgggtttaacgccgattgaggccaacggttatctcgatttttttatcgaccgaccgctgggaatgaaaggttatattctcaatctcaccattcgcggtcagggggtggtgaaaaatcagggacgagaatttgtttgccgaccgggtgatattttgctgttcccgccaggagagattcatcactacggtcgtcatccggaggctcgcgaatggtatcaccagtgggtttactttcgtccgcgcgcctactggcatgaatggcttaactggccgtcaatatttgccaatacggggttctttcgcccggatgaagcgcaccagccgcatttcagcgacctgtttgggcaaatcattaacgccgggcaaggggaagggcgctattcggagctgctggcgataaatctgcttgagcaattgttactgcggcgcatggaagcgattaacgagtcgctccatccaccgatggataatcgggtacgcgaggcttgtcagtacatcagcgatcacctggcagacagcaattttgatatcgccagcgtcgcacagcatgtttgcttgtcgccgtcgcgtctgtcacatcttttccgccagcagttagggattagcgtcttaagctggcgcgaggaccaacgtatcagccaggcgaagctgcttttgagcaccacccggatgcctatcgccaccgtcggtcgcaatgttggttttgacgatcaactctatttctcgcgggtatttaaaaaatgcaccggggccagcccgagcgagttccgtgccggttgtgaagaaaaagtgaatgatgtagccgtcaagttgtcataataaatcgcaataaaactgtctgcttacataaacagtaatacaaggggtgttatgagccatattcaacgggaaacgtcttgctcgaggccgcgattaaattccaacatggatgctgatttatatgggtataaatgggctcgcgataatgtcgggcaatcaggtgcgacaatctatcgattgtatgggaagcccgatgcgccagagttgtttctgaaacatggcaaaggtagcgttgccaatgatgttacagatgagatggtcagactaaactggctgacggaatttatgcctcttccgaccatcaagcattttatccgtactcctgatgatgcatggttactcaccactgcgatccccgggaaaacagcattccaggtattagaagaatatcctgattcaggtgaaaatattgttgatgcgctggcagtgttcctgcgccggttgcattcgattcctgtttgtaattgtccttttaacagcgatcgcgtatttcgtctcgctcaggcgcaatcacgaatgaataacggtttggttgatgcgagtgattttgatgacgagcgtaatggctggcctgttgaacaagtctggaaagaaatgcataagcttttgccattctcaccggattcagtcgtcactcatggtgatttctcacttgataaccttatttttgacgaggggaaattaataggttgtattgatgttggacgagtcggaatcgcagaccgataccaggatcttgccatcctatggaactgcctcggtgagttttctccttcattacagaaacggctttttcaaaaatatggtattgataatcctgatatgaataaattgcagtttcatttgatgctcgatgagtttttctaatcagaattggttaattggttgtaacactggcagagcattacgctgacttgacgggactcgagattatagctcctgccctatgggattcacctttatgttgataagaaataaaacgataagcttaattaatctttctgcgaattgagatgacgccactggctgggcgtcatcccggtttcccgggtaaacaccaccgaaaaatagttactatcttcaaagccacattcggtcgaaatatcactgattaacaggcggctatgctggagaagatattgcgcatgacacactctgacctgtcgcagatattgattgatggtcattccagtctgctggcgaaattgctgacgcaaaacgcgctcactgcacgatgcctcatcacaaaatttatccagcgcaaagggacttttcaggctagccgccagccgggtaatcagcttatccagcaacgtttcgctggatgttggcggcaacgaatcactggtgtaacgatggcgattcagcaacatcaccaactgcccgaacagcaactcagccatttcgttagcaaacggcacatgctgactactttcatgctcaagctgaccgataacctgccgcgcctgcgccatccccatgctacctaagcgccagtgtggttgccctgcgctggcgttaaatcccggaatcgccccctgccagtcaagattcagcttcagacgctccgggcaataaataatattctgcaaaaccagatcgttaacggaagcgtaggagtgtttatcgtcagcatgaatgtaaaagagatcgccacgggtaatgcgataagggcgatcgttgagtacatgcaggccattaccgcgccagacaatcaccagctcacaaaaatcatgtgtatgttcagcaaagacatcttgcggataacggtcagccacagcgactgcctgctggtcgctggcaaaaaaatcatctttgagaagttttaactgatgcgccaccgtggctacctcggccagagaacgaagttgattattcgcaatatggcgtacaaatacgttgagaagattcgcgttattgcagaaagccatcccgtccctggcgaatatcacgcggtgaccagttaaactctcggcgaaaaagcgtcgaaaagtggttactgtcgctgaatccacagcgataggcgatgtcagtaacgctggcctcgctgtggcgtagcagatgtcgggctttcatcagtcgcaggcggttcaggtatcgctgaggcgtcagtcccgtttgctgcttaagctgccgatgtagcgtacgcagtgaaagagaaaattgatccgccacggcatcccaattcacctcatcggcaaaatggtcctccagccaggccagaagcaagttgagacgtgatgcgctgttttccaggttctcctgcaaactgcttttacgcagcaagagcagtaattgcataaacaagatctcgcgactggcggtcgagggtaaatcattttccccttcctgctgttccatctgtgcaaccagctgtcgcacctgctgcaatacgctgtggttaacgcgccagtgagacggatactgcccatccagctcttgtggcagcaactgattcagcccggcgagaaactgaaatcgatccggcgagcgatacagcacattggtcagacacagattatcggtatgttcatacagatgccgatcatgatcgcgtacgaaacagaccgtgccaccggtgatggtatagggctgcccattaaacacatgaatacccgtgccatgttcgacaatcacaatttcatgaaaatcatgatgatgttcaggaaaatccgcctgcgggagccggggttctatcgccacggacgcgttaccagacggaaaaaaatccacactatgtaatacggtcatactggcctcctgatgtcgtcaacacggcgaaatagtaatcacgaggtcaggttcttaccttaaattttcgacggaaaaccacgtaaaaaacgtcgatttttcaagatacagcgtgaattttcaggaaatgcggtgagcatcacatcaccacaattcagcaaattgtgaacatcatcacgttcatctttccctggttgccaatggcccattttcctgtcagtaacgagaaggtcgcgaattcaggcgctttttagactggtcgtaatgggaattcgtttttttgggaattcgagctctaaggaggttataaaaaatggataagaaatactcaataggcttagatatcggcacaaatagcgtcggatgggcggtgatcactgatgaatataaggttccgtctaaaaagttcaaggttctgggaaatacagaccgccacagtatcaaaaaaaatcttataggggctcttttatttgacagtggagagacagcggaagcgactcgtctcaaacggacagctcgtagaaggtatacacgtcggaagaatcgtatttgttatctacaggagattttttcaaatgagatggcgaaagtagatgatagtttctttcatcgacttgaagagtcttttttggtggaagaagacaagaagcatgaacgtcatcctatttttggaaatatagtagatgaagttgcttatcatgagaaatatccaactatctatcatctgcgaaaaaaattggtagattctactgataaagcggatttgcgcttaatctatttggccttagcgcatatgattaagtttcgtggtcattttttgattgagggagatttaaatcctgataatagtgatgtggacaaactatttatccagttggtacaaacctacaatcaattatttgaagaaaaccctattaacgcaagtggagtagatgctaaagcgattctttctgcacgattgagtaaatcaagacgattagaaaatctcattgctcagctccccggtgagaagaaaaatggcttatttgggaatctcattgctttgtcattgggtttgacccctaattttaaatcaaattttgatttggcagaagatgctaaattacagctttcaaaagatacttacgatgatgatttagataatttattggcgcaaattggagatcaatatgctgatttgtttttggcagctaagaatttatcagatgctattttactttcagatatcctaagagtaaatactgaaataactaaggctcccctatcagcttcaatgattaaacgctacgatgaacatcatcaagacttgactcttttaaaagctttagttcgacaacaacttccagaaaagtataaagaaatcttttttgatcaatcaaaaaacggatatgcaggttatattgatgggggagctagccaagaagaattttataaatttatcaaaccaattttagaaaaaatggatggtactgaggaattattggtgaaactaaatcgtgaagatttgctgcgcaagcaacggacctttgacaacggctctattccccatcaaattcacttgggtgagctgcatgctattttgagaagacaagaagacttttatccatttttaaaagacaatcgtgagaagattgaaaaaatcttgacttttcgaattccttattatgttggtccattggcgcgtggcaatagtcgttttgcatggatgactcggaagtctgaagaaacaattaccccatggaattttgaagaagttgtcgataaaggtgcttcagctcaatcatttattgaacgcatgacaaactttgataaaaatcttccaaatgaaaaagtactaccaaaacatagtttgctttatgagtattttacggtttataacgaattgacaaaggtcaaatatgttactgaaggaatgcgaaaaccagcatttctttcaggtgaacagaagaaagccattgttgatttactcttcaaaacaaatcgaaaagtaaccgttaagcaattaaaagaagattatttcaaaaaaatagaatgttttgatagtgttgaaatttcaggagttgaagatagatttaatgcttcattaggtacctaccatgatttgctaaaaattattaaagataaagattttttggataatgaagaaaatgaagatatcttagaggatattgttttaacattgaccttatttgaagatagggagatgattgaggaaagacttaaaacatatgctcacctctttgatgataaggtgatgaaacagcttaaacgtcgccgttatactggttggggacgtttgtctcgaaaattgattaatggtattagggataagcaatctggcaaaacaatattagattttttgaaatcagatggttttgccaatcgcaattttatgcagctgatccatgatgatagtttgacatttaaagaagacattcaaaaagcacaagtgtctggacaaggcgatagtttacatgaacatattgcaaatttagctggtagccctgctattaaaaaaggtattttacagactgtaaaagttgttgatgaattggtcaaagtaatggggcggcataagccagaaaatatcgttattgaaatggcacgtgaaaatcagacaactcaaaagggccagaaaaattcgcgagagcgtatgaaacgaatcgaagaaggtatcaaagaattaggaagtcagattcttaaagagcatcctgttgaaaatactcaattgcaaaatgaaaagctctatctctattatctccaaaatggaagagacatgtatgtggaccaagaattagatattaatcgtttaagtgattatgatgtcgatcacattgttccacaaagtttccttaaagacgattcaatagacaataaggtcttaacgcgttctgataaaaatcgtggtaaatcggataacgttccaagtgaagaagtagtcaaaaagatgaaaaactattggagacaacttctaaacgccaagttaatcactcaacgtaagtttgataatttaacgaaagctgaacgtggaggtttgagtgaacttgataaagctggttttatcaaacgccaattggttgaaactcgccaaatcactaagcatgtggcacaaattttggatagtcgcatgaatactaaatacgatgaaaatgataaacttattcgagaggttaaagtgattaccttaaaatctaaattagtttctgacttccgaaaagatttccaattctataaagtacgtgagattaacaattaccatcatgcccatgatgcgtatctaaatgccgtcgttggaactgctttgattaagaaatatccaaaacttgaatcggagtttgtctatggtgattataaagtttatgatgttcgtaaaatgattgctaagtctgagcaagaaataggcaaagcaaccgcaaaatatttcttttactctaatatcatgaacttcttcaaaacagaaattacacttgcaaatggagagattcgcaaacgccctctaatcgaaactaatggggaaactggagaaattgtctgggataaagggcgagattttgccacagtgcgcaaagtattgtccatgccccaagtcaatattgtcaagaaaacagaagtacagacaggcggattctccaaggagtcaattttaccaaaaagaaattcggacaagcttattgctcgtaaaaaagactgggatccaaaaaaatatggtggttttgatagtccaacggtagcttattcagtcctagtggttgctaaggtggaaaaagggaaatcgaagaagttaaaatccgttaaagagttactagggatcacaattatggaaagaagttcctttgaaaaaaatccgattgactttttagaagctaaaggatataaggaagttaaaaaagacttaatcattaaactacctaaatatagtctttttgagttagaaaacggtcgtaaacggatgctggctagtgccggagaattacaaaaaggaaatgagctggctctgccaagcaaatatgtgaattttttatatttagctagtcattatgaaaagttgaagggtagtccagaagataacgaacaaaaacaattgtttgtggagcagcataagcattatttagatgagattattgagcaaatcagtgaattttctaagcgtgttattttagcagatgccaatttagataaagttcttagtgcatataacaaacatagagacaaaccaatacgtgaacaagcagaaaatattattcatttatttacgttgacgaatcttggagctcccgctgcttttaaatattttgatacaacaattgatcgtaaacgatatacgtctacaaaagaagttttagatgccactcttatccatcaatccatcactggtctttatgaaacacgcattgatttgagtcagctaggaggtgactgagcatcaaataaaacgaaaggctcagtcgaaagactgggcctttcgttttatctgtctaggtttatacataggcgagtactctgttatggagtcagatcttagctagtacgtcgaaacgaagtagttttagagctagaaatagcaagttaaaataaggctagtccgttatcaacttgaaaaagtggcaccgagtcggtgcttagcatccaaactcgagtaaggatctccaggcatcaaataaaacgaaaggctcagtcgaaagactgggcctttcgttttatctgttgtttgtcggtgaacgctctctactagagtcacactggctcaccttcgggtgggcctttctgcgtttatacctagggcgttcggctgcggctctacttttgccaacaatgatcaggattattgccgctagaaatagcaagttaaaataagtgcattagccagtctgaatgacctgtcacgggataatccgaagtggtcagactggaaaatcagagggcaggaactgctgaacagcaaaaagtcagatagcaccacatagcagacccgccataaaacgccctgagaagcccgtgacgggcttttcttgtattatgggtagtttccttgcatgaatccataaaaggcgcctgtagtgccatttacccccattcactgccagagccgtgagcgcagcgaactgaatgtcacgaaaaagacagcgactcaggtgcctgatggtcggagacaaaaggaatattcagcgatttgcccgattgcggccgcaaccgagcttgcgagggtgctacttaagcctttagggttttaaggtctgttttgtagaggagcaaacagcgtttgcgacatccttttgtaatactgcggaactgactaaagtagt

SEQ ID NO: 12 - DNA, 4442 bp, synthetic construct
  source 1..4442: mol_type = other DNA
tagggataacagggtaatccgtagaaaagatcaaaggatcttcttgagatcctttttttctgcgcgtaatctgctgcttgcaaacaaaaaaaccaccgctaccagcggtggtttgtttgccggatcaagagctaccaactctttttccgaaggtaactggcttcagcagagcgcagataccaaatactgtccttctagtgtagccgtagttaggccaccacttcaagaactctgtagcaccgcctacatacctcgctctgctaatcctgttaccagtggctgctgccagtggcgataagtcgtgtcttaccgggttggactcaagacgatagttaccggataaggcgcagcggtcgggctgaacggggggttcgtgcacacagcccagcttggagcgaacgacctacaccgaactgagatacctacagcgtgagctatgagaaagcgccacgcttcccgaagggagaaaggcggacaggtatccggtaagcggcagggtcggaacaggagagcgcacgagggagcttccagggggaaacgcctggtatctttatagtcctgtcgggtttcgccacctctgacttgagcgtcgatttttgtgatgctcgtcaggggggcggagcctatggaaaaacgccagcaacgcggcctttttacggttcctggccttttgctggccttttgctcacatgttctttcctgcgttatcccctgattctgtggataaccgtattaccgcctttgagtgagctgataccgctcgccgcagccgaacgaccgagcgcagcgagtcagtgagcgaggaagcggaagagcgctgacttccgcgtttccagactttacgaaacacggaaaccgaagaccattcatgttgttgctcaggtcgcagacgttttgcagcagcagtcgcttcacgttcgctcgcgtatcggtgattcattctgctaaccagtaaggcaaccccgccagcctagccgggtcctcaacgacaggagcacgatcatgcgcacccgtggctagaggatcgatcctttttaacccatcacatatacctgccgttcactattatttagtgaaatgagatattatgatattttctgaattgtgattaaaaaggcaactttatgcccatgcaacagaaactataaaaaatacagagaatgaaaagaaacagatagattttttagttctttaggcccgtagtctgcaaatccttttatgattttctatcaaacaaaagaggaaaatagaccagttgcaatccaaacgagagtctaatagaatgaggtcgaaaagtaaatcgcgcgggtttgttactgataaagcaggcaagacctaaaatgtgtaaagggcaaagtgtatactttggcgtcaccccttacatattttaggtctttttttattgtgcgtaactaacttgccatcttcaaacaggagggctggaagaagcagaccgctaacacagtacataaaaaaggagacatgaacgatgaacatcaaaaagtttgcaaaacaagcaacagtattaacctttactaccgcactgctggcaggaggcgcaactcaagcgtttgcgaaagaaacgaaccaaaagccatataaggaaacatacggcatttcccatattacacgccatgatatgctgcaaatccctgaacagcaaaaaaatgaaaaatatcaagttcctgaattcgattcgtccacaattaaaaatatctcttctgcaaaaggcctggacgtttgggacagctggccattacaaaacgctgacggcactgtcgcaaactatcacggctaccacatcgtctttgcattagccggagatcctaaaaatgcggatgacacatcgatttacatgttctatcaaaaagtcggcgaaacttctattgacagctggaaaaacgctggccgcgtctttaaagacagcgacaaattcgatgcaaatgattctatcctaaaagaccaaacacaagaatggtcaggttcagccacatttacatctgacggaaaaatccgtttattctacactgatttctccggtaaacattacggcaaacaaacactgacaactgcacaagttaacgtatcagcatcagacagctctttgaacatcaacggtgtagaggattataaatcaatctttgacggtgacggaaaaacgtatcaaaatgtacagcagttcatcgatgaaggcaactacagctcaggcgacaaccatacgctgagagatcctcactacgtagaagataaaggccacaaatacttagtatttgaagcaaacactggaactgaagatggctaccaaggcgaagaatctttatttaacaaagcatactatggcaaaagcacatcattcttccgtcaagaaagtcaaaaacttctgcaaagcgataaaaaacgcacggctgagttagcaaacggcgctctcggtatgattgagctaaacgatgattacacactgaaaaaagtgatgaaaccgctgattgcatctaacacagtaacagatgaaattgaacgcgcgaacgtctttaaaatgaacggcaaatggtacctgttcactgactcccgcggatcaaaaatgacgattgacggcattacgtctaacgatatttacatgcttggttatgtttctaattctttaactggcccatacaagccgctgaacaaaactggccttgtgttaaaaatggatcttgatcctaacgatgtaacctttacttactcacacttcgctgtacctcaagcgaaaggaaacaatgtcgtgattacaagctatatgacaaacagaggattctacgcagacaaacaatcaacgtttgcgccaagcttcctgctgaacatcaaaggcaagaaaacatctgttgtcaaagacagcatccttgaacaaggacaattaacagttaacaaataaaaacgcaaaagaaaatgccgatatcctattggcattttcattaccctgttatccctactaaaagaacgtttgccgatacgccgcacttggttcgtagtattcaacccaatcagcagatttctttatcgactggggtgaatgatagcgggctgtttatgcttaattttgatgatgagcgtttcttgccatttgaaggttctggcgttgattcaagctggcgtttgcaattcaccaatttgaaacagaatttggatagcctcaacgatgtcattctacatgtgaagtatacagccgcgattggctcatcaactttcagtcagggcgtaaggaaaatattggccaatataaacaacgatgaatgatcggcacgtaagaggttccaactttcaccataatgaaataagatcactaccgggcgtattttttgagttatcgagattttcaggagctaaggaagctaaaatggagaaaaaaatcactggatataccaccgttgatatatcccaatggcatcgtaaagaacattttgaggcatttcagtcagttgctcaatgtacctataaccagaccgttcagctggatattacggcctttttaaagaccgtaaagaaaaataagcacaagttttatccggcctttattcacattcttgcccgcctgatgaatgctcatccggagttccgtatggcaatgaaagacggtgagctggtgatatgggatagtgttcacccttgttacaccgttttccatgagcaaactgaaacgttttcatcgctctggagtgaataccacgacgatttccggcagtttctacacatatattcgcaagatgtggcgtgttacggtgaaaacctggcctatttccctaaagggtttattgagaatatgtttttcgtctcagccaatccctgggtgagtttcaccagttttgatttaaacgtggccaatatggacaacttcttcgcccccgttttcactatgggcaaatattatacgcaaggcgacaaggtgctgatgccgctggcgattcaggttcatcatgccgtttgtgatggcttccatgtcggcagaatgcttaatgaattacaacagtactgcgatgagtggcagggcggggcgtaatttttttaaggcagttattgtagtacgtcgaaacgaagtagggcgtaaggaaaatattggccaatataaacaacgatgaacatcatcatcaccaccaccaccactaactgctgtttttgatcagctatttattttttcaatcatatttatctcacttggctcctttttaatcaaaggagccaacaaaaatagtggagttctgttatggtcaataaatatacttacacctcatctaaagcaatgtctgatattagtgatgttattggtgaacctttagctgcatgggatagtcaggtcggtgggcgggtatttaacgttatatttgatggtaaagtttataccaatacctattgggttgaacgctggcaggttcccggtattggtagttctgatggtaaccctcacaatg

SEQ ID NO: 13 - DNA, 4415 bp, synthetic construct
  source 1..4415: mol_type = other DNA
tagggataacagggtaatccgtagaaaagatcaaaggatcttcttgagatcctttttttctgcgcgtaatctgctgcttgcaaacaaaaaaaccaccgctaccagcggtggtttgtttgccggatcaagagctaccaactctttttccgaaggtaactggcttcagcagagcgcagataccaaatactgtccttctagtgtagccgtagttaggccaccacttcaagaactctgtagcaccgcctacatacctcgctctgctaatcctgttaccagtggctgctgccagtggcgataagtcgtgtcttaccgggttggactcaagacgatagttaccggataaggcgcagcggtcgggctgaacggggggttcgtgcacacagcccagcttggagcgaacgacctacaccgaactgagatacctacagcgtgagctatgagaaagcgccacgcttcccgaagggagaaaggcggacaggtatccggtaagcggcagggtcggaacaggagagcgcacgagggagcttccagggggaaacgcctggtatctttatagtcctgtcgggtttcgccacctctgacttgagcgtcgatttttgtgatgctcgtcaggggggcggagcctatggaaaaacgccagcaacgcggcctttttacggttcctggccttttgctggccttttgctcacatgttctttcctgcgttatcccctgattctgtggataaccgtattaccgcctttgagtgagctgataccgctcgccgcagccgaacgaccgagcgcagcgagtcagtgagcgaggaagcggaagagcgctgacttccgcgtttccagactttacgaaacacggaaaccgaagaccattcatgttgttgctcaggtcgcagacgttttgcagcagcagtcgcttcacgttcgctcgcgtatcggtgattcattctgctaaccagtaaggcaaccccgccagcctagccgggtcctcaacgacaggagcacgatcatgcgcacccgtggctagaggatcgatcctttttaacccatcacatatacctgccgttcactattatttagtgaaatgagatattatgatattttctgaattgtgattaaaaaggcaactttatgcccatgcaacagaaactataaaaaatacagagaatgaaaagaaacagatagattttttagttctttaggcccgtagtctgcaaatccttttatgattttctatcaaacaaaagaggaaaatagaccagttgcaatccaaacgagagtctaatagaatgaggtcgaaaagtaaatcgcgcgggtttgttactgataaagcaggcaagacctaaaatgtgtaaagggcaaagtgtatactttggcgtcaccccttacatattttaggtctttttttattgtgcgtaactaacttgccatcttcaaacaggagggctggaagaagcagaccgctaacacagtacataaaaaaggagacatgaacgatgaacatcaaaaagtttgcaaaacaagcaacagtattaacctttactaccgcactgctggcaggaggcgcaactcaagcgtttgcgaaagaaacgaaccaaaagccatataaggaaacatacggcatttcccatattacacgccatgatatgctgcaaatccctgaacagcaaaaaaatgaaaaatatcaagttcctgaattcgattcgtccacaattaaaaatatctcttctgcaaaaggcctggacgtttgggacagctggccattacaaaacgctgacggcactgtcgcaaactatcacggctaccacatcgtctttgcattagccggagatcctaaaaatgcggatgacacatcgatttacatgttctatcaaaaagtcggcgaaacttctattgacagctggaaaaacgctggccgcgtctttaaagacagcgacaaattcgatgcaaatgattctatcctaaaagaccaaacacaagaatggtcaggttcagccacatttacatctgacggaaaaatccgtttattctacactgatttctccggtaaacattacggcaaacaaacactgacaactgcacaagttaacgtatcagcatcagacagctctttgaacatcaacggtgtagaggattataaatcaatctttgacggtgacggaaaaacgtatcaaaatgtacagcagttcatcgatgaaggcaactacagctcaggcgacaaccatacgctgagagatcctcactacgtagaagataaaggccacaaatacttagtatttgaagcaaacactggaactgaagatggctaccaaggcgaagaatctttatttaacaaagcatactatggcaaaagcacatcattcttccgtcaagaaagtcaaaaacttctgcaaagcgataaaaaacgcacggctgagttagcaaacggcgctctcggtatgattgagctaaacgatgattacacactgaaaaaagtgatgaaaccgctgattgcatctaacacagtaacagatgaaattgaacgcgcgaacgtctttaaaatgaacggcaaatggtacctgttcactgactcccgcggatcaaaaatgacgattgacggcattacgtctaacgatatttacatgcttggttatgtttctaattctttaactggcccatacaagccgctgaacaaaactggccttgtgttaaaaatggatcttgatcctaacgatgtaacctttacttactcacacttcgctgtacctcaagcgaaaggaaacaatgtcgtgattacaagctatatgacaaacagaggattctacgcagacaaacaatcaacgtttgcgccaagcttcctgctgaacatcaaaggcaagaaaacatctgttgtcaaagacagcatccttgaacaaggacaattaacagttaacaaataaaaacgcaaaagaaaatgccgatatcctattggcattttcattaccctgttatccctactaaaagaacgtttgccgatacgccgcacttggttcgtagtattcaacccaatcagcagatttctttatcgactggggtgaatgatagcgggctgtttatgcttaattttgatgatgagcgtttcttgccatttgaaggttctggcgttgattcaagctggcgtttgcaattcaccaatttgaaacagaatttggatagcctcaacgatgtcattctacatgtgaagtatacagccgcgattggctcatcaactttcagtcagggcgtaaggaaaatattggccaatataaacaacgatgaactagaagtattatttcaaggaccctcaagtggtcatcatcatcaccaccaccaccactaatgatcggcacgtaagaggttccaactttcaccataatgaaataagatcactaccgggcgtattttttgagttatcgagattttcaggagctaaggaagctaaaatggagaaaaaaatcactggatataccaccgttgatatatcccaatggcatcgtaaagaacattttgaggcatttcagtcagttgctcaatgtacctataaccagaccgttcagctggatattacggcctttttaaagaccgtaaagaaaaataagcacaagttttatccggcctttattcacattcttgcccgcctgatgaatgctcatccggagttccgtatggcaatgaaagacggtgagctggtgatatgggatagtgttcacccttgttacaccgttttccatgagcaaactgaaacgttttcatcgctctggagtgaataccacgacgatttccggcagtttctacacatatattcgcaagatgtggcgtgttacggtgaaaacctggcctatttccctaaagggtttattgagaatatgtttttcgtctcagccaatccctgggtgagtttcaccagttttgatttaaacgtggccaatatggacaacttcttcgcccccgttttcactatgggcaaatattatacgcaaggcgacaaggtgctgatgccgctggcgattcaggttcatcatgccgtttgtgatggcttccatgtcggcagaatgcttaatgaattacaacagtactgcgatgagtggcagggcggggcgtaatttttttaaggcagttattgctgctgtttttgatcagctatttattttttcaatcatatttatctcacttggctcctttttaatcaaaggagccaacaaaaatagtggagttctgttatggtcaataaatatacttacacctcatctaaagcaatgtctgatattagtgatgttattggtgaacctttagctgcatgggatagtcaggtcggtgggcgggtatttaacgttatatttgatggtaaagtttataccaatacctattgggttgaacgctggcaggttcccggtattggtagttctgatggtaaccctcacaatg

SEQ ID NO: 14 - DNA, 5677 bp, synthetic construct
  source 1..5677: mol_type = other DNA
gaagatcctttgatcttttctacggattaccctgttatccctacgaaatgacagagaaactctgtaaacacaggggacaagcgttctatttttgcacatgtatttgttcatattattgaacaattagttcaatcgaataagaaggatcaataagataagctcaatatcgctatgtttaattaaataataagctaattacactggctaaagaaatataaaaaaatagcagcaaagcattacaacaacaacttattacgttatatttggtaaaaatatgaagctcatcaatattaacaaacaataaccaagggtagccttacaaaattacttttgttgcgatatattgcgggcattctaattttaaggaggagcaataactgccttaaaaaaattacgccccgccctgccactcatcgcagtactgttgtaattcattaagcattctgccgacatggaagccatcacaaacggcatgatgaacctgaatcgccagcggcatcagcaccttgtcgccttgcgtataatatttgcccatagtgaaaacgggggcgaagaagttgtccatattggccacgtttaaatcaaaactggtgaaactcacccagggattggctgagacgaaaaacatattctcaataaaccctttagggaaataggccaggttttcaccgtaacacgccacatcttgcgaatatatgtgtagaaactgccggaaatcgtcgtggtattcactccagagcgatgaaaacgtttcagtttgctcatggaaaacggtgtaacaagggtgaacactatcccatatcaccagctcaccgtctttcattgccatacggaactccggatgagcattcatcaggcgggcaagaatgtgaataaaggccggataaaacttgtgcttatttttctttacggtctttaaaaaggccgtaatatccagctgaacggtctggttataggtacattgagcaactgactgaaatgcctcaaaatgttctttacgatgccattgggatatatcaacggtggtatatccagtgatttttttctccattttagcttccttagctcctgaaaatctcgataactcaaaaaatacgcccggtagtgatcttatttcattatggtgaaagttggaacctcttacgtgccgatcactatgctactccgtcaagccgtcaattgtctgattcgttaccaattatgacaacttgacggctacatcattcactttttcttcacaaccggcacggaactcgctcgggctggccccggtgcattttttaaatacccgcgagaaatagagttgatcgtcaaaaccaacattgcgaccgacggtggcgataggcatccgggtggtgctcaaaagcagcttcgcctggctgatacgttggtcctcgcgccagcttaagacgctaatccctaactgctggcggaaaagatgtgacagacgcgacggcgacaagcaaacatgctgtgcgacgctggcgatatcaaaattgctgtctgccaggtgatcgctgatgtactgacaagcctcgcgtacccgattatccatcggtggatggagcgactcgttaatcgcttccatgcgccgcagtaacaattgctcaagcagatttatcgccagcagctccgaatagcgcccttccccttgcccggcgttaatgatttgcccaaacaggtcgctgaaatgcggctggtgcgcttcatccgggcgaaagaaccccgtattggcaaatattgacggccagttaagccattcatgccagtaggcgcgcggacgaaagtaaacccactggtgataccattcgcgagcctccggatgacgaccgtagtgatgaatctctcctggcgggaacagcaaaatatcacccggtcggcaaacaaattctcgtccctgatttttcaccaccccctgaccgcgaatggtgagattgagaatataacctttcattcccagcggtcggtcgataaaaaaatcgagataaccgttggcctcaatcggcgttaaacccgccaccagatgggcattaaacgagtatcccggcagcaggggatcattttgcgcttcagccatacttttcatactcccgccattcagagaagaaaccaattgtccatattgcatcagacattgccgtcactgcgtcttttactggctcttctcgctaaccaaaccggtaaccccgcttattaaaagcattctgtaacaaagcgggaccaaagccatgacaaaaacgcgtaacaaaagtgtctataatcacggcagaaaagtccacattgattatttgcacggcgtcacactttgctatgccatagcatttttatccataagattagcggatcctacctgacgctttttatcgcaactctctactgtttctccatacccgtttttttgggctaacaggaggaattaaccatgatgtattttgtagtggcagatgaaaagattgtgtatagcctgaaaggtagtgtagagttaacgaataaagagtatttattatttatcgcactggttaatcatgcgtcaaacggtcagctaatagatagggatgatttactcactttggtttggccagaaagagagatgacgataaacaataacaacatccatcaactattcagtcgattaaaaaagaaagtcgttctaattagtgatgattttgaattacaatctttgcgagggaaatcttacaaagtaaacaacaagaagaacatgtccgttcgttatattaatcacaactctatctagggataacagggtaatgaaaatgccaataggatatcggcattttcttttgcgtttttatttgttaactgttaattgtccttgttcaaggatgctgtctttgacaacagatgttttcttgcctttgatgttcagcaggaagcttggcgcaaacgttgattgtttgtctgcgtagaatcctctgtttgtcatatagcttgtaatcacgacattgtttcctttcgcttgaggtacagcgaagtgtgagtaagtaaaggttacatcgttaggatcaagatccatttttaacacaaggccagttttgttcagcggcttgtatgggccagttaaagaattagaaacataaccaagcatgtaaatatcgttagacgtaatgccgtcaatcgtcatttttgatccgcgggagtcagtgaacaggtaccatttgccgttcattttaaagacgttcgcgcgttcaatttcatctgttactgtgttagatgcaatcagcggtttcatcacttttttcagtgtgtaatcatcgtttagctcaatcataccgagagcgccgtttgctaactcagccgtgcgttttttatcgctttgcagaagtttttgactttcttgacggaagaatgatgtgcttttgccatagtatgctttgttaaataaagattcttcgccttggtagccatcttcagttccagtgtttgcttcaaatactaagtatttgtggcctttatcttctacgtagtgaggatctctcagcgtatggttgtcgcctgagctgtagttgccttcatcgatgaactgctgtacattttgatacgtttttccgtcaccgtcaaagattgatttataatcctctacaccgttgatgttcaaagagctgtctgatgctgatacgttaacttgtgcagttgtcagtgtttgtttgccgtaatgtttaccggagaaatcagtgtagaataaacggatttttccgtcagatgtaaatgtggctgaacctgaccattcttgtgtttggtcttttaggatagaatcatttgcatcgaatttgtcgctgtctttaaagacgcggccagcgtttttccagctgtcaatagaagtttcgccgactttttgatagaacatgtaaatcgatgtgtcatccgcatttttaggatctccggctaatgcaaagacgatgtggtagccgtgatagtttgcgacagtgccgtcagcgttttgtaatggccagctgtcccaaacgtccaggccttttgcagaagagatatttttaattgtggacgaatcgaattcaggaacttgatatttttcatttttttgctgttcagggatttgcagcatatcatggcgtgtaatatgggaaatgccgtatgtttccttatatggcttttggttcgtttctttcgcaaacgcttgagttgcgcctcctgccagcagtgcggtagtaaaggttaatactgttgcttgttttgcaaactttttgatgttcatcgttcatgtctccttttttatgtactgtgttagcggtctgcttcttccagccctcctgtttgaagatggcaagttagttacgcacaataaaaaaagacctaaaatatgtaaggggtgacgccaaagtatacactttgccctttacacattttaggtcttgcctgctttatcagtaacaaacccgcgcgatttacttttcgacctcattctattagactctcgtttggattgcaactggtctattttcctcttttgtttgatagaaaatcataaaaggatttgcagactacgggcctaaagaactaaaaaatctatctgtttcttttcattctctgtattttttatagtttctgttgcatgggcataaagttgcctttttaatcacaattcagaaaatatcataatatctcatttcactaaataatagtgaacggcaggtatatgtgatgggttaaaaaggatcgatcctctagccacgggtgcgcatgatcgtgctcctgtcgttgaggacccggctaggctggcggggttgccttactggttagcagaatgaatcaccgatacgcgagcgaacgtgaagcgactgctgctgcaaaacgtctgcgacctgagcaacaacatgaatggtcttcggtttccgtgtttcgtaaagtctggaaacgcggaagtcagcgctcttccgcttcctcgctcactgactcgctgcgctcggtcgttcggctgcggcgagcggtatcagctcactcaaaggcggtaatacggttatccacagaatcaggggataacgcaggaaagaacatgtgagcaaaaggccagcaaaaggccaggaaccgtaaaaaggccgcgttgctggcgtttttccataggctccgcccccctgacgagcatcacaaaaatcgacgctcaagtcagaggtggcgaaacccgacaggactataaagataccaggcgtttccccctggaagctccctcgtgcgctctcctgttccgaccctgccgcttaccggatacctgtccgcctttctcccttcgggaagcgtggcgctttctcatagctcacgctgtaggtatctcagttcggtgtaggtcgttcgctccaagctgggctgtgtgcacgaaccccccgttcagcccgaccgctgcgccttatccggtaactatcgtcttgagtccaacccggtaagacacgacttatcgccactggcagcagccactggtaacaggattagcagagcgaggtatgtaggcggtgctacagagttcttgaagtggtggcctaactacggctacactagaaggacagtatttggtatctgcgctctgctgaagccagttaccttcggaaaaagagttggtagctcttgatccggcaaacaaaccaccgctggtagcggtggtttttttgtttgcaagcagcagattacgcgcagaaaaaaaggatctcaa

SEQ ID NO: 15 - DNA, 5684 bp, synthetic construct
  source 1..5684: mol_type = other DNA
ttgagatcctttttttctgcgcgtaatctgctgcttgcaaacaaaaaaaccaccgctaccagcggtggtttgtttgccggatcaagagctaccaactctttttccgaaggtaactggcttcagcagagcgcagataccaaatactgtccttctagtgtagccgtagttaggccaccacttcaagaactctgtagcaccgcctacatacctcgctctgctaatcctgttaccagtggctgctgccagtggcgataagtcgtgtcttaccgggttggactcaagacgatagttaccggataaggcgcagcggtcgggctgaacggggggttcgtgcacacagcccagcttggagcgaacgacctacaccgaactgagatacctacagcgtgagctatgagaaagcgccacgcttcccgaagggagaaaggcggacaggtatccggtaagcggcagggtcggaacaggagagcgcacgagggagcttccagggggaaacgcctggtatctttatagtcctgtcgggtttcgccacctctgacttgagcgtcgatttttgtgatgctcgtcaggggggcggagcctatggaaaaacgccagcaacgcggcctttttacggttcctggccttttgctggccttttgctcacatgttctttcctgcgttatcccctgattctgtggataaccgtattaccgcctttgagtgagctgataccgctcgccgcagccgaacgaccgagcgcagcgagtcagtgagcgaggaagcggaagagcgctgacttccgcgtttccagactttacgaaacacggaaaccgaagaccattcatgttgttgctcaggtcgcagacgttttgcagcagcagtcgcttcacgttcgctcgcgtatcggtgattcattctgctaaccagtaaggcaaccccgccagcctagccgggtcctcaacgacaggagcacgatcatgcgcacccgtggctagaggatcgatcctttttaacccatcacatatacctgccgttcactattatttagtgaaatgagatattatgatattttctgaattgtgattaaaaaggcaactttatgcccatgcaacagaaactataaaaaatacagagaatgaaaagaaacagatagattttttagttctttaggcccgtagtctgcaaatccttttatgattttctatcaaacaaaagaggaaaatagaccagttgcaatccaaacgagagtctaatagaatgaggtcgaaaagtaaatcgcgcgggtttgttactgataaagcaggcaagacctaaaatgtgtaaagggcaaagtgtatactttggcgtcaccccttacatattttaggtctttttttattgtgcgtaactaacttgccatcttcaaacaggagggctggaagaagcagaccgctaacacagtacataaaaaaggagacatgaacgatgaacatcaaaaagtttgcaaaacaagcaacagtattaacctttactaccgcactgctggcaggaggcgcaactcaagcgtttgcgaaagaaacgaaccaaaagccatataaggaaacatacggcatttcccatattacacgccatgatatgctgcaaatccctgaacagcaaaaaaatgaaaaatatcaagttcctgaattcgattcgtccacaattaaaaatatctcttctgcaaaaggcctggacgtttgggacagctggccattacaaaacgctgacggcactgtcgcaaactatcacggctaccacatcgtctttgcattagccggagatcctaaaaatgcggatgacacatcgatttacatgttctatcaaaaagtcggcgaaacttctattgacagctggaaaaacgctggccgcgtctttaaagacagcgacaaattcgatgcaaatgattctatcctaaaagaccaaacacaagaatggtcaggttcagccacatttacatctgacggaaaaatccgtttattctacactgatttctccggtaaacattacggcaaacaaacactgacaactgcacaagttaacgtatcagcatcagacagctctttgaacatcaacggtgtagaggattataaatcaatctttgacggtgacggaaaaacgtatcaaaatgtacagcagttcatcgatgaaggcaactacagctcaggcgacaaccatacgctgagagatcctcactacgtagaagataaaggccacaaatacttagtatttgaagcaaacactggaactgaagatggctaccaaggcgaagaatctttatttaacaaagcatactatggcaaaagcacatcattcttccgtcaagaaagtcaaaaacttctgcaaagcgataaaaaacgcacggctgagttagcaaacggcgctctcggtatgattgagctaaacgatgattacacactgaaaaaagtgatgaaaccgctgattgcatctaacacagtaacagatgaaattgaacgcgcgaacgtctttaaaatgaacggcaaatggtacctgttcactgactcccgcggatcaaaaatgacgattgacggcattacgtctaacgatatttacatgcttggttatgtttctaattctttaactggcccatacaagccgctgaacaaaactggccttgtgttaaaaatggatcttgatcctaacgatgtaacctttacttactcacacttcgctgtacctcaagcgaaaggaaacaatgtcgtgattacaagctatatgacaaacagaggattctacgcagacaaacaatcaacgtttgcgccaagcttcctgctgaacatcaaaggcaagaaaacatctgttgtcaaagacagcatccttgaacaaggacaattaacagttaacaaataaaaacgcaaaagaaaatgccgatatcctattggcattttcattaccctgttatccctagatagagttgtgattaatataacgaacggacatgttcttcttgttgtttactttgtaagatttccctcgcaaagattgtaattcaaaatcatcactaattagaacgactttcttttttaatcgactgaatagttgatggatgttgttattgtttatcgtcatctctctttctggccaaaccaaagtgagtaaatcatccctatctattagctgaccgtttgacgcatgattaaccagtgcgataaataataaatactctttattcgttaactctacactacctttcaggctatacacaatcttttcatctgccactacaaaatacatcatggttaattcctcctgttagcccaaaaaaacgggtatggagaaacagtagagagttgcgataaaaagcgtcaggtaggatccgctaatcttatggataaaaatgctatggcatagcaaagtgtgacgccgtgcaaataatcaatgtggacttttctgccgtgattatagacacttttgttacgcgtttttgtcatggctttggtcccgctttgttacagaatgcttttaataagcggggttaccggtttggttagcgagaagagccagtaaaagacgcagtgacggcaatgtctgatgcaatatggacaattggtttcttctctgaatggcgggagtatgaaaagtatggctgaagcgcaaaatgatcccctgctgccgggatactcgtttaatgcccatctggtggcgggtttaacgccgattgaggccaacggttatctcgatttttttatcgaccgaccgctgggaatgaaaggttatattctcaatctcaccattcgcggtcagggggtggtgaaaaatcagggacgagaatttgtttgccgaccgggtgatattttgctgttcccgccaggagagattcatcactacggtcgtcatccggaggctcgcgaatggtatcaccagtgggtttactttcgtccgcgcgcctactggcatgaatggcttaactggccgtcaatatttgccaatacggggttctttcgcccggatgaagcgcaccagccgcatttcagcgacctgtttgggcaaatcattaacgccgggcaaggggaagggcgctattcggagctgctggcgataaatctgcttgagcaattgttactgcggcgcatggaagcgattaacgagtcgctccatccaccgatggataatcgggtacgcgaggcttgtcagtacatcagcgatcacctggcagacagcaattttgatatcgccagcgtcgcacagcatgtttgcttgtcgccgtcgcgtctgtcacatcttttccgccagcagttagggattagcgtcttaagctggcgcgaggaccaacgtatcagccaggcgaagctgcttttgagcaccacccggatgcctatcgccaccgtcggtcgcaatgttggttttgacgatcaactctatttctcgcgggtatttaaaaaatgcaccggggccagcccgagcgagttccgtgccggttgtgaagaaaaagtgaatgatgtagccgtcaagttgtcataattggtaacgaatcagacaattgacggcttgacggagtagcatagtgatcggcacgtaagaggttccaactttcaccataatgaaataagatcactaccgggcgtattttttgagttatcgagattttcaggagctaaggaagctaaaatggagaaaaaaatcactggatataccaccgttgatatatcccaatggcatcgtaaagaacattttgaggcatttcagtcagttgctcaatgtacctataaccagaccgttcagctggatattacggcctttttaaagaccgtaaagaaaaataagcacaagttttatccggcctttattcacattcttgcccgcctgatgaatgctcatccggagttccgtatggcaatgaaagacggtgagctggtgatatgggatagtgttcacccttgttacaccgttttccatgagcaaactgaaacgttttcatcgctctggagtgaataccacgacgatttccggcagtttctacacatatattcgcaagatgtggcgtgttacggtgaaaacctggcctatttccctaaagggtttattgagaatatgtttttcgtctcagccaatccctgggtgagtttcaccagttttgatttaaacgtggccaatatggacaacttcttcgcccccgttttcactatgggcaaatattatacgcaaggcgacaaggtgctgatgccgctggcgattcaggttcatcatgccgtttgtgatggcttccatgtcggcagaatgcttaatgaattacaacagtactgcgatgagtggcagggcggggcgtaatttttttaaggcagttattgccgttatttaacgtcacaaagtggggggactatcccggttatgtggaagaattaaatctatcgttggcgcgttgtaatgcagataaaacggcggtggcccaaataatgtctccccaaaaaggataaatctctcttttagtcaattcagacaagggcattgactctataagattggcaaacatggatttaccgattttgtactcaatatcgaggcgctgccgtaagcatgcctggcaaaagcaggataataggttattggttgcgaaagaaacacggcggttaggggcgctcttcgctaggatgacagtcaagcttactgcaaaaagaaatctatgtagggataacagggtaatccgtagaaaagatcaaaggatcttc
